United States Patent Application Publication US 2026/0191916 A1 - sequence listing, part 99

SEQ ID NO: 636 - DNA, 5066780 bp, Parabacteroides merdae (residues 3,377,855-5,066,780 of 5,066,780)
  source 1..5066780: mol_type = genomic DNA
atggcaggaaagtcccttatacggttaaggacgagcatatcgtgatcgatacaagagaggtggcaaacggagagaatcgcgtgactatcgaatttacggcaaacgatcagtcgcttaaccgccgggacgaattcctctatacgttgctggtccctgaccgggcgcgtacgctcttcccttgtttcgaccaaccggacatgaaatcgcttttcaccctgtcgttggaggttccgtcttcctggcaggcggtcaccaacggggcggtcgaacaggtggattcgacatccgtcgccaggcgcaagcggatttctttccgggaaacggaaccgctcagcacctatcttttctcttttgttgccggtaagctgacacgggaaacgtattcgcgcgacggacggaacatttcgatctaccatcgtgagaccgacccgaagaaagtagcacagtgctccgatatcgcatccgaagtgttcgatgcactcgaatggcaggaggaatatacacagataccataccccttcgccaaatacgatctgatcattttgccgggattccagtttggcggaatggaacatacgggagcaactttatatacggacggccggatgttcctgaacgagaacccgacattgaacgagcgtctggcacgcagttccttgattgcgcacgagacttcgcatatgtggttcggggacttcgtgacgatggaatggttcaatgatgtctggacaaaagaggtctttgccaattattatgcctcccagataatcgagcctctgtttccggaggtgaaccattctttgaatttcatgcttgactatatccccgcggcctattccgaagatcgtaccgccggtgccaatccggtgaagcagcaactggagaacatgcgagatgccggattgatgtacggtaatatcatctatgacaagtctccggttatcctggaaatgctgattaagaaaatggggaaggaatctttccaaaaaggaatccgggaatatctgaagacgtatgcatacggaaatgcaacttgggaaggcttgatcggtatcctggacaaatatacgaacgacgatctggcggcctggagccgggtttgggtgaatgaaaagggcatgccggagatatgtggagtgatatccgaagatggcaaatcgttgcaggtctcgcagaaagatccgttaggacgcgggctgttgtgggaacaagacttgtcttttctggttgtctatcctgacggagggacggaggacgtgcaagtttcatttggaaaagagcaggcgtcatgcctcaaggaactgaaaaggcaggcgagcgaaggctgtttcgtcatgcccaatgccgatggcaaaggatatggtttcttccgcctgcttgagaaagatgcgaaggcttgtttgggcaaccttcccgcttgcaaggacgaggtgttgagaggttctttgttgattacgttgtacgagaatttattgaaccggactatccctgcagagctttatatggaagcaatgttggattatttgcctacggaaaacaattctctgttgttctcggccgccctcggatatatcggtaattgccaacgtttctatctcgctgatccggagaaactggaactggtgctctggcgaatcgtgacaatggcggaacaatcccaacaacgtttgcaggcgttccgccaatatcgttctattgcccgctcgccagaagcggtcggaaaactatacgcgctctggaaagaccaaaaagcgcctgccggctgttcgctgagcgaaaacgattatatcagcctatcgtacggcctggcaatccaaatgcccgacaaagccgatgaaattgtagcgacccagcaagcccggatcaccaatccggaccgtaaacggcaatatgcgttcatctcgccatctgtttctccccaaaaggaagtacgtgacagtgtgtttgcctctctgctcgtagccgagaaccgtcgcgtcgagccgtgggcttcggccgccttgtcgaacctgaactgccagttgcgccagaaagaagcggtcggttatatccgtccggcactggaagccttgcaggaaatacagcgtacgggagacatcttttttccgcgtgattgggtacgggctttattgagcggacatacttcgccggaggctaagaaggaggtggacgatttctttgccgcccacccggactatccggtcctgctctcaaataaaatccgtcagcaggcggatcatttgtacagataaccggaattatcgggttaaaattggcctcataataaaaaatcaccccgattggctaatcttttgtaagttttatttgctaattcaattattattgtaactttgcaacataaaaataataacaaatgaaaagtacggttctgcatctccaccatcatcatcattacaacgggcaatagttcggtgggctgtgtggtatgtaggaacatatgatataaatgaataaggcttgccgtttacggtgggccttattttgtttttggaataatatatataaacaaaataaacatgttacgaatcgcagtacaatcaaaaggtcgtctttacgatgaaacaatgcttctcttagaagaagctggtattaaactaaacaggggaaaacgtattttgctgttgtcggcaaaaggttttccggtagaagtcttattcttgcgcgatgacgatattccacaatctgtagccaatggagttgccgacataggtatcgttggcgaaaacgaatatgtagaaaaagggcaggaggccaagctgatcaaacgtttaggattcagcaaatgccgtctttcactcgccattccgaaagatgaagattatcagggggtggaatggttcgccggaaaaacgatcgcaacttcctatccggaaatactgaaggcttatctggctgaaaagggagtgaaagcagaccttcacgtaatcagcgggtctgtggaaattgcgccgggcatcggcctcgcggatgcgattttcgatatcgtcagctccggcagcacgctggtgagcaatcagctcaaagaagtggaagtcatcatgcaaagcgaagccttgttgattgctaacaataacctgtcggaagagaaacaggctatcctggacgaactgttgttccgtttcgaggcgatccaagtagcggatggcaagaagtatgtattgctgaacgctccgaaagacaagatggacgagatcatagaagtgctgccgggcatgaagagcccgaccatcacgccgcttgccgacgggaactgggtgtctgtccaatccgtcatagcggagaaacatttctgggaaatcatcggtaaactgaaatcattgggagcagaaggcatactggtgctaccgatcgagaaaatgattttgtaaattaagaagtaattcttacctcttaattttttaattcttaattcttaatttttaatttataaagtggaagtaatcaaatatccgtcaagagaagaatgggcctcattggcccagcgtccggcgctggatgtcacgacactgttcgatacggtccgcacggtgctggatgaagtccggaagggaggagatgccgccgttatccggtatgaggagatgttcgacaagatagatcccgctaccttcaaaaggttgcaggtttcagaacaggaattagcggaagcgaaggagctcgtacctgaagagctgaagcaagctatccgtcaagcaaagaataatatagagatatttcacgcctcacagcgttttatgggaaagaaggtggagacgacacccggtgtcacctgttggcagaaagcggtagcgatagaaaaagtcggtttatacattcccggcggaacggctcctcttttctctaccgtcctgatgttggctgtcccggcacgtattgccggctgtaaggaaatcgtgctttgtacgcctccgggcagggatggaaaggtacaccccgccatcctgtttgccgcggaaacggcaggcgtcagcaagatattcaaggcaggaggtatccaggccatagcggcgatggcttacggaacggaatcggttccgaaggtctataagatattcggtcccggtaaccagtatgtgacggcggccaaacagttggtcagcctgaaagaggtggccatcgacatgcctgccggtccttccgaagtggaagtgattgcggacgaatcggccaatcccgcctttatcgccgcagatttcctttcccaggcggaacatggagtggacagccaggccatgctggtgacggcatccgaaagcatcgtcaaaccggtcatgcaagcgatccgggaacagctggaccggctgccccgtaaggagatcacggaaaaatcgttgagccacagccgtcttatcgtgctgaaggataaacaggaagtgatcgacttcaccaacctgtacgctccggagcatctgattatccagacgaccgattatgcagatattgccggacaggtcgaaaatgcaggcagtgtcttcatgggaccctatacgccggaaagcgctggcgactacgcttccggtacgaaccatacgttgccgaccaacggatatgcaaaagcctacagtggcgtgaacctggacagcttcatcaagaagatcacgttccaggagatcacggccgacggcatccggctgttgggcgggacgatccggacaatggcggccaacgagcagttggatgcgcacaagaatgcagtaacaatcagattgaacacattatgaaagacttaaaagatttagtcagacccaatgtctggaacatgaaaccctactcgtctgccagagatgagtttcaaggtaatgcctccgttttcctggatgcaaacgaaaacccgtttaacagaccgtacaaccgctatcccgatcctttgcaatgggaactgaagaagaagattgcggagatcaaaggggtgaaacgcgagtctatctttctggggaacggaagtgacgaaccgatcgatctgattatccgtgcgttttgcgaaccgtctatcgacagcatcgtaagcatcgcgccttcctacggcatgtatgaagtcgcggccaatgtcaataacgtagagttccggaagatcaagctggacgaaaagttcgacctggataccgacagccttctggaagcggcaaacgactgggtgaaggtgatattcctgtgttctcccaacaacccgacgggaaataatctgagccgtgaccgcctttacaaagtattgaatactttccaggggatcgttgtgattgacgaggcttatgtcgatttctccatcgagccttctttcttaggcgagttggataaattcccgaatctgatcgtcctgcaaaccatgtccaaagcgtggggggctgccggaatccggttgggaatggcttttgcttctcccgaaatcattgcgatcctcaataagatcaaatatccgtacaatgtaaatctgctgactcaggaacgtgccttgtatatacttgaaaacaaggaacagatggaaaaacagcttcgttcgatcctttccgagcggattcgtctgcaggctgcattgccggagttgaactgcgtgcgcaagatttatcctacggatgcaaattttatcctggtcgaagtgacgaatgccgatacgatctataaaaatctggtcagacagggtattatcgtccgtaaccggacaaatgtgaccatgtgtaacggctgccttcgcatcacggtcggcaagtcggatgaaaacgatgctttgctcgaagcgcttaaaaaaatgtaaagatttatgaaatgaaaagagccttatttatagaccgggacggaacgcttgtgatagagccgccggtggactatcagttggacagcctggagaagttagtgttttatccgaaggtgttccgtaacctgtactttatccgtaaacagttggatttcgagtttgtgatggtgacgaaccaggacggtttgggtacggattcctttccggaagacactttctggccggcacacgacaagatgttgaagaccttggaaggcgaggggatccgtttcgacgatatcctgatcgaccgttcttttccggaagaaaactctccgaaccggaaaccccgtacaggtatgttaggccgctatctgtccggcgaatatgacctggcaaacagttatgtgataggtgatcggctgacggatatgcagctggcagccaatttaggggcaaaagggatatggcttcgtccggatgacgtcgaggcgcgacagttgctcacggagaatacggctatttctcccgtcctgattacagacgattgggaccgaatcacggaatatctttttgccggagaacgccggggcactatccgacgtacgacaaaggaaacggatatttttgtagaagtgaatctggacggacatggacggacggagatttccaccggtctcggcttcttcgaccatatgctcgaccagatcggaaaacattcgggtatcgatttgacggtacgggtgaaaggagatctggaagtagacgaacatcatacgatagaggatacggctattgcgcttggagaagctttgttaaaggctttaggcgacaagagggggatcgaacgctacggttactgtctgccgatggacgattgtctgtgcagtgtggcgcttgatttcggcggacgtccctggttagtctgggatgcagcctttcaccgtgagaaagtaggggatatgccgaccgaaatgttcttgcatttctttaaaagcctgagcgatgccgcccgcatgaacctgaacattaaagcggaaggcacaaacgagcaccataagatcgaaggaatcttcaaggctttggcccgctccatcaagatggctatccgccgcgacatctacaggtatgaactgccgagtacaaagggaactttgtaaattaagaattaaaaattaagaattaaaaaattacggtcgatgatattttttaattcttaatttttaattttcaatttactccgcgttcggtccttccacatagagcttgccgttctcatcgattcccatcttgtcgataaagacaactcgctcgtttcctgttttctgagtgtaaccgtgataaacgcaatacatctgcttgccgtctttcgaccaggtcacgctgttatgccccgtaccggtaacgatgcctccctgctccacattcttttgtagcacaggattatcgttcgatttgacaaacgggccgagcggactttttgctgttgcatagccgacagcataattctttcctttataatagttggccgaatacatcatatagtaggtatcgccttttttcatcgtataaggaccttccgtccaacggcggttgatctcaccggaagtaacggagcggctttcccattcggattgcgtgtcgtccagttttactggcggacggagcagcaggaccggttcaccgatcacttctgtcaaatccggctttacctcgatgccatatatccagctttcctctatctcgtcgaacttcccttcttttttagccttttcggcaatttcgctttccaccggatgtttgtagcaacaacgggaaaaatacagataggtccgtccatcctcgtcgtcgatcaggttcccgtcgataaccggatagcccggatcaaacaaaggtttgtcgaataattccttgaaaggtcctgtcggtttatctgcaacggccactccgatacggaaattttccaattcgttagtcggattttctttccagtcggcactgtacagcatatagaacttgccaccacgttcgtacacctccggcgcccagaagttggcgactccccatgatcccggaacattgccccggaatacctgtccttcggctttccagtttaccaagtcgggggaggaatacacactgaagccgtcgacggcgcctccgcctgttccatacatgtagtatatgccgtccgaagccagcagtacataaggatcaccaaactgtacgggaaggggattggtatgcacgatactcttttcctgttgttccttctgcactttgtgtacgcaggaagaaaaagctaatacagctgaaagcagtattacaaattgtttcatttgtctcatagaatgtctgtaaaattaaaaacacataataaagtggtgacaaatatacaaaattgaaattatttcctttcctttgatgtccgatttaagcagaaaaaagagtatggttagaaatatattgatagcattttgtgtgatcctgttcgtctcgtgcagcaaggacacggaatccaagttgttcggtaaatggcaattacagaaggtagaagcaagcggtgacgtgcagaatgtcgatacggtttattttaattttgaacattctttgtttatgtaccaggtgtacgttacggaaatcgactctttccgccatcaatatggctacaacacgttggaaggtgaaaaaacattgctgctggaattggagaacaatccggggccgatcagtaaattcctgccctataccgattggaattcttccaaacaaacctatacaatcgataaactggaatccaagcaactgatcttaagccgtgaggggaaaacatatacgttccggaagttctaaagattaaataagaaatgcgagccgactttgaaagttgctcgtgagatcagccgaaaattgaatatcgatgctgatatcgtcttaggtgtataaaattaaagaaagaagaaaagagccgagatcggtaaaaattaccagtctcggctctttttttgtttaaacagacagttctccgggacgttcggaatcgtcagccccgttgccgtttgaccctgatcttttctttcgctggttgttggcggtggttgtttcggtgatcagctggttcaggttgttgacaaatgccgttgccgcctccgaaggtacggcaacgctgtaggattgtgctagcatgaccagatcttcataatatccgtcgatccgctcgcgcagaaccgcaccgctttccttcttgttggctgcccggttctgtgtccgttggctcgtcaggctgatataggcgttgttctccttttcgagttcgtccaaataagccgccagtccgagcgtctccacgtaggagatgttttcgtcctttctcaaatcgatcaaaagcccttgtatcttggcactttcctgtgctaccgggagacgggcgataccgatataaggcttgatgaccttgtataaatattttcctgcatctctttcagcctcaagtggcaatgttccggcacgggagatacgtgtcgtgatgtaaacaactaaattatcccgattcttttcgtgtaattcggctttttccgtttcctgcgagatacggctttcatccacaacgtctgccagggcaagcacgttcttttccattgcattgacaaactcttttgacagaccgatgtccggagctcctgatgcttgcacttctttgtccaaagagagttcatccggacggtcttcctcgccgcccgatgggggagggagcaaagcgagtacggagttcatataggccaggtactcggcgttattgagtgtgtaaagcatgattactttgattttcgtgtatgttcccataggcattcgaattaaatgtttaaattgttctgcaaggtagacaataattattgatttagcattgctttctgcatttattgtccggaaaagtcttcaagaaaccttgaaatgccgttccaacggtgaaaaatatcttcaagaaatcttaaaaccgtttttgaatggagaaaagtcgtttcaagatttctcaaaacggcttttcaaaggtgcaaacccatttcaagatttcttgagaccgccctgcacggtgaaaaacggcttcaggatttcttgaaatgggtttgcaggggtgcgacggggggacgagatttcttgaagaggggaaacggcccggcaaaaaatcatagggaattatttgcttaatcattcaaaaacacgatctttgtggacgtattgaagataaagtagaagcgtttcgatattatcttgtactgaaatctggacaatttcaactacgcaagataatagatcaaatggctcctgcgcttgtgtttgttatatacctgtctggtaacggatagtttatataccatcataaagcgtgggatcattgttctattattgcgtagtgggcagtccagagcctcagtacagtgatagacgatggttcccacgctttttttatttattattttctatagggagcatagaaaaaatacttttgatatgaatagtttaaaatttgaatgttatttattgctgagtgtattaattttgagtctatttgggtgtgataaagaagagacagtacaaggatattacattaaaaatttaaaaggacttgatttagagaaaattcaagtctatgaattttcgttagattcagctttattatttggatttcgagatcagaaaatttggattgggctatttgacaatcatactaagaagcaactacatgagtgggaaagtttaaacgtatataaagagaaagaatataaaattgattatgggagaactattacatggaatatagaaggtattgactgtttattaaagactgatttaggttatgtttgttattcacgaggaattagttatggtgaagacccgtatggaggtggttatcctactcttggaccggatcttttcttttttaaacatgatgagaatattatttatgtaaatcagccagaaaaatttattactgcaaatgtatgcggtctgcttgcatggtataatggaagcatagtttctggatcttctaatgttaatgaaagtattgtatattctatggaaggagaaaaaataacaaacttaaagtattcacctaataggataaacgatatccctgtttcttacacagaaggaataagaattaatagaggatatgttgttgatagatatgattaccaaaccggaaaatcaatttgggaaacctctttagaaaaagttcaagctgatgcattaatgactgttgatacaataaaaagaacagaagaaatctgggaatttacttgtgatataacaaacaaagacggtagtaaagaacaaattaagtttacccttaatattaaaaatggaatgctgacttatatttaatgacaaagaggggcaaatcggataaactggacgcagatgaaacgcatatttattttgacactgtccagaattttgtgtaaatgaaaacaggattcagttgtaagtttgttcttatatctggattctgttttcaaacataagcataaattgattcataatcaagccccagtttgaaataggcattgtccatttcttttcaatctccataagcgaaagatatacggtcttttttacagcatcgtccgaaggaaatgaaagctttgatttcgtgtactttctgatttttccattcaggttctcaatgagattggttgtgtagattatttttctgatttccagcgggaattggaagaaaacagtcaaatcatcccagttgtttctccatgaaagtatagcataaggatactttcctccccatttcttttccagattgtcaagttctgtggctgcaacctctttgttgggtgcattatagatattcttcatatccgctgtaaactctttcttatccttataaacgacatatttacaggaatttctgatctgatgtaccacacagatttgagtggatgactgagggaatacactgcggatagtatccgtaaatccattcagattgtcggtacaggtaatcagtatatcctgcactccacgggcttttaagtcggtcaggacgcccatccagaaagaagagctttccgatttgccaacccacatgccaagaacttccttcaggccgttctgtttcagtccgacgcaaaggtaaacggtcttgtttatgatcttgccgttatcccgtaccttgaagacaataccgtccatccagactatcaggtaaacaggatcaaggggacggttctgccactcctgggcagcctgattgactttgttggtaatgatggaaatggccgatgtagagagctctatttcataaatctcacgcatctcttcctctatgtcagaaacgctcattcctttggcgtatagggagataacgagcttttctatagaaagtccacgactttcatgtttgggcactgctatcggctcaaactggccgttacggtcacgtggaatagaaatgacagactctccatgttcggtctggattttcttcggataactgccattccgggagttgccggtattgttccctgtcacagaattcttttcatagcccaaatgggcatccatttcgccttcaagcatcttctccagcacctgggcatgcaactgtttcagaaacttgctcacatccgcttctgtcttgaactggctaaggaactccttgcttaacacctcatcgggcactacttgattcttttctttcataatcttcttcattttgcaaatctataaaataaaaaatacgagactcaaacttgaatcccgtattttccatttacacaaaatattttatagtgccccaaaaaactgtgttagcaaagttaatattttattctttgctgacacagtttaatttacatcctctttcgttttgaaaatttgtacttttcgttttgccaattatactaagtcaaaagatatatgtaatttcttttgtttcatttctatttaatttttagttcattagttgatccatccattcaacagcctcttcaatagaagcggcttttttaaactctttggtaacacaatatctcatatactcacaacaaagttcctcagagtcattaaaatatatgttaaaggctccgttatcgtccgctccggtacaggctatccccaattccaacgcttttttcacattttctttatcacgggaaaaataagcataagtatcaccactgcacccctttaatcccaccaatcttatcaatggttccatattcatattctttagtagttatgattcagataaatattttatcaaactctctttgtctttgaaaagtcttttatcccatttgggataattgtttctgggtacactaagtccatctgacagcttataaaccataaagaaattatcatcagcataggatatttcgatgattattttgcttatagttgtatggataatgttatccccgctcagatagcatacgctatctcctacgttaaattcagtatctatattcataccttttttaaataataactgggtaatcttgttactaacaaaaataaaagttacttttgtaaaaaatcaatcacttgcaagatgaggagtcttgctgtttttaaacgaggtcaagcgtttttatatgattgaataaagtggatgccagattgccgtctgcattcacttttatttaatattgagttatccaatcattgtgattatcgtgaatgttgccaaggcgcaggctgccatttttcaccataaaaaatatgtcagccgcagtaggcatattttgccatgacaattgaaattgacataagatactattccactcaacaactctaacattctttcctgttgggtcattcattatatcaccctcgtaaatctcctttccgctcttgtcttttaggccagtgtattgacctatagttgttttatcacacataactccagacaattgaaagaagttgtgggttctaaagttagaaaccacaaacatcaaaacagcagtttcccatccttcttctccatcaccgcattgaaaacacttttataggtttcatataaatctttcctattttctggtcctggccaatcagcgaaagactctcctgcaaagaatttccaagcaaagatccgtttggctttttcggataagcttaattgatcgattatgttccggatatcctgcatacgttcccggatatattcggtatgatccgggctgtcatcgggttcgtcgatgatattcagccgtcgccaatctacattctcatctaccggaataggcttgtatttatgccggtatggagacgtgtccgaggtaacgtttaactttatcatttgcaggatatagaagtcaagttcagtgtatttaccctgtttggcttccattaatcgggtgagatactccgggggcttttgaagcagcatacacattacctcgttcaatacgtcaatagcttcgtctgtcattccggcaagtgagctgtgatacttagcgtaatccagccacctgtcgtaacgtttttcaatatatttattcaatgcctcacttgccatagtcgtctttatttgatatatttgtttctgattgtaagagggtggcgctgtgaggcgctgcctttcttttatctaagatattggaaatagttgttccattcttttttagccaatttaggggcgaatgagaataggtatcctaatgcttttaggacaatcccggcgataagaaacaatcctcctatacatattgaaataagaaagggaacagtgagtaacattgctatgatttttatatttactttcatgtttattcctcctcttcgttcgtatcaaaaagatttgccatcatatcaacaatattcgtctggatattatcttcagcccctaatacggcattactgatatgcttcttttcttcgatgatcctgtagagcttctggtcaatcgtccgacggccgagcaggtagtagcaattcactgagtctttctgcccgatgcgatgggcacggctttctgcctgatcacaatctgcatacgtccaaggtagctcaataaaagcgacatcactggctgctgtgagcgtaataccggcactggccgctttaatggaacagatgataacgtccgtcttcgggttcttttgaaaggcatcgacagaagcctgcttctcctgcatattctgtcgtccggtgacgcagacggcggaaggaaaagctatcatcaggcggtctacaatttcatgcaggttacagaacaggatgatctttttcccattctcccgaaagtccttcacgaagtcgataacctctttcaatttaccgcgtgcagtaatatctttcagaataccgatacgaaccatcacttcccctttcagtgacttttgaatcttttcgtcgtccgcttccttgtatcgtttcaggtaatcgatcaagtcgcgttccgcatccatatattccttgcggttcgttatctcacaggaaacaatctgacgcactttatccggcaactgggtgagtactttcgacttttcccgacgaaagaagcagtgttgccatagcttataatttagctcctttagattgctcgcttggttagggccggaacagtaccgaagcatgaaacctttccatccacccatatcgatcatgcgatccataatacccaattgtgcaaccagatcctttggtttgttgacaacaggtgtcccagtcagcaagatgatatattctttcccggatgcaatgcctttgcaaaacttggtctgctgggtggccgttgatttgactttatgcgattcgtcgattatcacggacttgaacagtttgatcgtgttgtgaaattcgacatctttcaatgtccatttctctgctttcatgatccgccggacaaagtattttcgtaggctttcgtagtttacgataaaaacctggttcatgcctgtctgccagaagaaaggccagctatcgcggacggaatcggttaataccatcgctttcttgtctgtaaacttatgccattccctttgccaattgatcttgacaacattcgggcagattaccaggcaggggaaggcgtcggccttgttgatagtggcgatgctttcaagtgtattgtgcgttacaatataattgtttgtcagatacaaatgatccggagcggttacgcttatacatacggaatcttcctctctaatatattcgatagacgagatataccgtgaacaatagttcgtctttttgatgttccattcggcagctttccgttcgaggtagaacgggcaaaccttgatcctcacgtttacttgaaactccacgcctttaccttcatttcgcctgtcgtacctgcgtatgatcgcctgtcctccaagggaacgtaccaaaagggcaatgtcacgtgccatgccataggaaagggtactgtaggtgatcctgtttttctttcccgatccatctgtatccatcaaaccgcgtaagaggtcgatgcgctgttccaccgatccgtgcatgtattcgtatggtatgaatttctctacactcggtttgtctgctttgagccgtttgatctcttggtaaaaacgattttcgtggactgtcggattctttgtaatgttgtatcgcggacacgtggcgtaatcgtcccgtatcaatagcatgtcgccgggtaaaagttttcttaccctttcggcaatagccacatccatatccggtgtagagaaagacagttttccgttaccaccgcaaagatggccgtctcccaaaagtacccccatgatgtaaggatggatgatgtataatctttccttgtacttcacaggttcacacattgggatttcccatttccgtcttgtatggttatggccaaaatctttcaggttgtaggttacgccggaatccatgatctcctgtgttgtcttggtgatccatcctttcccctttcttctacggttgacatctcggacacaccacagatgttctggcccgcattcacaggatacgccatcagagaacgtaactttgaacacgcggcgttctttttgtggaaacacgccgcttacggcatatatatttccgtccctgccgaatatctcgtctccaatttgtaactctccgatccgtctgaagctgtttggagtagccacgtaactactgaccggttgttgtttaccaagtcccatatcgtctccattgataaaccgtttcagttgcaagcctcgtgcgattccttgcagttgataggggtaaggctgtacttttagtccatgttctccgtctagttccggcatttccggtatttgaaaagcaacatcttcctctgtctgtgattgtgcaatcgttccccattgtaccggttcgaaatggcgaacgtaataagtcaattgatccaattctgctttgcatttgttggttgccggaatcagccatgcgcccgtttgtttgtcccaccagcggatggaaacagagcttttcagcttgtctacaacctgctggcggtatctgtcaaacttcaccgcataacattgacctttttctgtattttgcagtgtaattgtcatagtggtaggtgttatgcaaattcgtcaaacgcttttatctcttcggcgacttcctccatttctgcttttttcttgcggccgcgtttcttcggcttcggctctgcttctccggtaatatcggattcttcaggaacatcgaaatcgaacgattcttgtttgattccatattttccgccgaacaagtaagcgtccacttcgtagtcaagtcggctgaccgcttgtcttaaagcatccccatacggatatccctcgccggattcgtcttcgaattttgtaaacgggacggaaaggttaaggacttgtccgcttttcaatagcttttgtgcctggatagaaacaccggccgattcgtctgatccacctttgctatacccagtgacaacgatatttttcagtttctcattcagatcatcatccgaaggattttcgatatttacaactccggcttcttgcatttcgcaaatcttgacggcatgagtctttaacaaactcatggcatataacaggtccggatgaacgaattgctgggatgatttggttacttcgttcttgtagtttgcttctacaaatcgctctgtgtagtcagctgttacctgattgtttttaagtttgactttctgaatttcatacacaggttgttcttttactaattcatcttccatactttttaaaatttaggattgttataactttggggcgctaaggccatttctgcttttgctttactgattacagtgcgacaccattccagttgatgagtcgcggtccggttcaaacgctcacaccaatcgacaagatattgttcatctttgcacagactgtcaatgatagcatttactgccttggaggtagccccggcacgtgaggctgtttcccgtaacgtatcgaagacttccgatttctttttcccgttcagatggtatttggcatctgctaacagtttcccggtccgggcgatatagacggcaaggtcgttcccacgtaggacagcttcttggacttcttcactcatggtaatattcagataggaatcaatggctgccaactcgttggatattttatctatgggtgtgatgtttaaattcatgtctgtttgtctttaaaatatatcttccgaaaaaaggatatcctatttattttcaaccgaacagcatccaccaccggaaggcaagttcttcgtacttttctttacctttctggtaaatcgtatcgcctcgtttaatgaatgctttgaacactttttgatttttcttggagataccatagatgaaatcctgccgactgcctgcgatatccatataccaggcgcgggaacggtcccaatcgaaaaagtcaatagcttcatcgaattgtttttgtgtgctggcaaaagtgcttttcaggtctcccccgaatccgtaggtcggaagccaccaatcccatttgcaccgggtatcgagcgtgtatttgaagttgccatattggaaacattggttcttattgaccatgaatcgttgagtttccgccttagcaagcacttgggccaggaaaggatcgtgtcgggcttccatgcggagagactttttcatggcttctgccagttcccaatcctcgccggaatacaatatatcgtccaccatgcgtttgtcatacctgaccctttccggttcggtaatcatcgcatcgattaggctgccgaatttgaatgctttctccttatccccgtattgggtacggggatagaggaggttctttagttccgtaaggtccgagttgctaacctccgaccgttggtaatacgtatcttgcatcttcttccttgagttttagatattcaatgactgcaaagtcaaattcgaaattgtaggtgttatccatcagccaccggaaccatttgcggccctcttccgtatcgagaatctttttcagaatacttggctcgcgtctgtattttccgaagtttatccatgaggacagatagagtttctttttcatatcatttggctgttatatcatcgatatactttaggtatgcggactggatttgctctccgtccttattcacaattttctcgcagtaggtaatcatcttcttatgtatcttctctagatcctccatgctcatattgattccttcgcgcatgaaccacatctgatatacctgcatgaatccttgtggattggttatctggatcttcttcttgaccttggctttcgttggagtaggggacatgctggctgctgagaaatcaaatgctgcctgtacttctgcagcagacttttctgcagccgctttggccttagcctcttcttcccggcgtttgcgttcttcttcctgcttttttctttcttccgcttcctgttgttttcgctcttcttccatacgggcagcttcaaccgcattggtacggcgtagctcttcctgttcttccagttgtttgcggaggctggggagtttgtcgatcaaatcctgctttgtaccctctatttcaaaacgataacgttctgtaaaatctttcttcttttgtatagcgacttcattttttattgccttacgggtttctgcgtccatatagaaggtttgtttgttgtcagaaacgttttcaacaaaagcactccaggagaaatttatacttgtttcggatattcgtcggcatacatcgttgtaggtagcgagagtagcgcggttgaacatgctgtttagtgcattgatatgcttttcaacgtatgcggcatacgctgtatccaacatgacagagatatccgatcggtattgagccttttcgttctccaacatctgtttacggcgagcttcctcttcccgtcgtttttgttcggcaatcttcttggccgcgtatttgttacgggcctgttggagcttataaggaatagtggtggtcgatttgacgtcgatagccgattccaaagaggtaaaagacttgctgaccgtagccagaagttgcgtcaatggcttacggcgcttgttcatgttctcgactgttattttcgtcttcgccaaatactctgagaccttctcatccagttcatccgagttaatacctcccgctgcttcaatggtgtccaaaagtgtttgtccggcttggttgcagtccgatacggaagtctggttgcgttgcaaggtggcaggagccgattgcatgatctgattgaattcttccactttaataagagaattgttagcttgtgtatccattgtgataaatttttaagtgattgatcgagtttattaaaatccggcgtcttcatcttcctgtgatattggggctgttatacctgatgcgggtaccggttccgcttgtggttgctctccgaattcctgtaaagggttttccgattgaggttggagggcttgtggctgctgtccgggttgattgggctgaataacggttgtttgttctaatccgtagtcaatatcctgcggttcttcttgagtttcgaatacagtaaactttccggtccggactttgggatatccgtcgaatgcgtgtttaatcagtttgctttccaagaacccaggatcgataccgccttcgtttgaagtatagagggcattcgccttaccttctttttgacgggtttgcggattccaacgttggttgtttttgtagctgtacgcctctaagcgtttgatatcaccctccatcatccaatgccagtctacagtcccatcggcgcggacaatacggataaaaccaccgatcaccttatttgatttgcggggacaggccgcctgataggtaacggtctttactccgtcaaccaatcccggtgagaatgtatcaccttcatagcaaacaaccggattatctacataccggacctgtccggcacgctggcgcataaccaattccccataaccggtgatggaaaggtaagcacgcagttcatagatgtcgttgccattgttgtccttatagccggtcttcgtgctgcggggaagaatatagcagtgggggcgtcctgtgggatcaagagacaggccgtttacggcaatatctaagaaacagccgtacagggacagtggagaacatctttgcagttccggcttgtcttgtaagattttccggaagttgaatttttccttttcataaatctgtgttccttggccggttccccagatcgcattgtacatgagtatgaacttctgttcaacccggctatcatccgctatcatgagcggatttagctgatttagttcagctactttaatttgaatttgatttgacatgattctattgtttaaaaattaattaccaatgtttctttatcgtgtaaaccattgccacgcaaccagatgccgtaactatatgctggaaataccccaagcaaatagcgataataccaagtatggcaagcgttccaaacaggatgtaaaatccccacctcgctacttgagcgagtttccagtaatttgttttcatacatcaatgattaattggcaaaagccgtttacttgtctttgaaatagcgagttggatttatattgtaaacatcctccgataaccctttacctggagtgccttgccgtgttaataattcatttagtaatcgtatggattcagggcgcatttatacaagtcttccaacctgtattcgattttgcccggccgtttgtaacgctgtaaagtaccttccgagacccatcgctccacattcttccgtccaaagcggatacgtgcttccttttgtccgataaactctctggttccggcttgtatcttggtgatttgccaagcgaggtattcaagttcgatttttcgaaaagaaggaatgtttggataggtgttatcggtctgcatgattattcgcttttaaaaagattcttttcgtttgcatatcgcataaactccgccatagagtgtatcgagagttttcggaacacgttcttccgatgattctttacggtgtgggacgatataaaaagcgcttccgcaatctcttcgtctttcttgccatagtagcaaagctccatcaccctaagttgactgtctgaaagtgtgctgttgaacttcggttcacagattttcttgaagccatcgcattctccacgcagcggacaaccgacaaattcaaacttgaagttccagttctcatcgatatcgatcatgttgtcatacagtccgaagttgcatttgataaacctgcgtacagccaggaaatcacgatagcatttgttcccgtcgtaacgggcgtaatatttacggagtgccgtgtaagcttccggatagaactcttccagcacctctagaaaacgctgaataaagtcggtatccgattcctttaactggcgctccggctgtccctgttctttgatgattacttcaccggatggagtggtatagaattctattgcatgcatgattctccctccggaaaaagaatttctataggtgcgcctaattctttagatatagcctttttgcaaagcttatcggggctgaatgtgcctcttaaccaattgtaaacagtttgttctgtacgctctgtcgcattagcaatccggcgaacgaactcctgcttgggcgttgggattttatcaagtgcttcatacctgtctttgaaagacagctcacttgctccatgactttgtagggttaatttttccattttttacctccttacattattatatatatactaatttctttacctttgatgttgtattaattattacaggtgcaaatatatactataatattttagtatatgtggttttatactaaaatattatagtaattaagagtatttaagatttatgacaaataagatatctttggctatttctggactatcgctgattatcagtctgatttctgtatcatgtgtgcttttgcgctgtgaaccaatgactgtggattggatgggtgtattggtcggtgttttgtctttgttggtagcatctcttgcggtattttttgcggttagttatttgacagttgagaaaaggataaggagtgcttttgaattaaaaatgaaagagtcttttgaagactttgaaaccaaaacagttaaaggtataattagtgaacaacataagataatagacatgctaagagattattttcttgcaaagaaagatcttagctcctatgtaacatctcttatctatagtttagatatggcggttagagttaaccaacaagatacaatagatttagttataggttgtcttattgatgtatactcagaagttaatgtggctaaaacattgaatataaaacaacataatattgataagctgtttttattacttgatgatctatctggaaggaatactcatattttgttgagcaagcttgagttcgtttatgatcgtccttgcggtgatacgcccaagacgtaatccatcattgaaggacttgatgtctttttctatatacttgtaatattcatgtagaaagatggtatcacaagctgttctaacttcttgtggaagtccagatgattgtctgatataatctttgtttgtcataatggcaagtattaaatgtttttcgcaaatatactaaaatattaaaatatgcaattatgtaaagctgaaatagtgcagaaagcgatagagctgatttctaattcaaccttatcaaattataagattgctaaagatacgggtataacggaagcttctataggaaattatagaaacggaaatacaagaccgactttggcgaatgctaatatcataatagattatttcaataaaaaggaattggaattgtctggttctaacttagttattaataccgaaacagaatataaagaagctatggagaaaggattaaagttattgccagaggttgatttcaagttctcaggcggaaatgcagagttgttaggaagtacagactctgtaaagcgatattggtatttacctgattgtaaagattgcgaagcaattgcccaagtcgcaggtaattcgatggctccggcctatccatccggttgctggattgctttgaaacgtttcagctttgagaaagagttccctaatcaaattccgtttgggaatgtattcggaattgttgtcgaagataagcagaccggagattatcatggtcatattaagatcttgcgtcgctatagtgatccctctttggccaagcgattttggatagcccggtctgtagatcgggagaaccatgatgattttgatatcgatattgaacaggtgcgtggtttgtggattgtgaagcagcatgtggttgcggatgtaatattgtagacttatcctttcacaaggaaatagtaaacataataactgtgatcgcagaggtaatattgctacggcgttgggggtgtttaaataaaaaagagttatggagatacatcattatacatcaattgagaatttagctctcatattgaaaaataaaacgatacgttttacaagacttgataaggttgatgatagcgaagaagcaggattatcctgtaaaaatatccaacttagttattatactttcgtgtcatgttggaccgatagtgaagaggaaagtattcctttatggaaaatgtatgctggtaaagagatgcacggaataagaattagcctagatagtgatatgttcttaaagtatcatattcctagtggaaggttttatggagttgatgtatattcgaagaatgaaaaaagttcaatactgccgattgaaaagatagtaacgaaagattacttagtagttccttcatttaatgattcggaaatgttctttaagaaagtattatatgtggataatccattttctgaaatgagagatgttgtgcaaatacaagatatgggaaatggggaaggagcaatgaaaatgaatctaaaaaagataggcttatataaacgaaaatgttgggcttttcaaaaagaacatcgtttcacattgactattttacctaatatttggggagatatagacataaaccagatgccaaaacggattatgcaggctgtatatgatagaatccctcccaagctttctttttttgatttagaaataaatcctgaattattatcaaaaatgaaaataacacttagccctatctgttcggaggcagaaaaggtgatagttgagtctatagttcagaaatttgcacctaaagccataattagagaaagtatgcttaagggcttaattaatagatgattattcctttaagtaaataattttctctatttcatcataatggtatttgagtgataaataatatgaatgatgaaataagtaacgatagtaagcttcattagcaaaaaatcctctcattaataaattgaaactaagcgagtttactaaaattgattttctggaatctattaatgtacagatgagagtttgataatgatcatctattgcattaaagcaatcatataagatacaattttttgtcataacttttaatttaaaatataaatagatggaagataaagacaaaataatagcctcactccggaagcagctcaaggaagctgttagccggtgtaatgccttagagcaagaaaatgctctattgtcatatcaacttgaaaagatggaggaaagatgtccggaatcacattaaagatagacaaaggtcaatcttccgctttctccgagattatgggattgctccagtcttttcctggattaaaggaatgcaagaaacattattcggtaaagctgacggaagaagaggttttccggttccggaatgaactggatcagattatgcaactattgccgcaattgagggaaaaggagtggttcgatattccggcttacgggacggatgaatgggctaactggatgatagatttacacagaaaaaatatgtaactttggagggtggtttacaaatagtttacagtcatatatgtaaatgattagaaattaatagattaaaatatatgtcagacagtattgttattattcccacgtataacgaaaaggagaatatagaaaatattattcgggttgtatttgggttggagaaagaatttcatattttgattatagatgatggatcgcccgatggtacggcaggtattgtaaaacggctgcaaaaagagttccccgaacgccttttcatggtggaacgtaaaggtaagttaggattgggtacggcttatatctgcggatttaaatgggcaatagaacataaatatgattttatattcgaaatggatgcagacttcagtcataacccgaatgatcttcccaaattatatgcggcctgtatggaacagggtggtgatgtcgcagtcggttcccgctactgtaacggtgtgaatgtcgtgaactggccattgggacgtgtgttgatgtcctattatgcttccgtatatgttcgttttgttactggaatgaaagtacaggatacgacagccggtttcaaatgctatcgtcgtgaggtgcttgagacgatcgatctggatcgtatccatttcaaaggatatgcgttccagatagaaatgaagtttacggcatataagtgtggttataaaatcgtggaagtccccattatttttatcaatcgtgtattaggcacttccaagatgaactcctctatcttcggggaagcactgtttggcgtattgaaattgaaatggtggagtctgtttcgtaaatatccccaaaaagggaatcgaaaagcgattgccggataatgccattattgtaaaaagcaataaaaagggatattcagtaaatgtctccacataataccatggcatatgaagatgatagagtataatcacttcatatgccattattattgtcatttttctgtatattctcatatactcttatcgggcaagacatgaagctccggaagaagtctgatgacctcttctgattctatctgtaaattcatgtcatgcagctttccccgttctgttcctgatcttgtcaatcatcagtatggcatttgccgtatgtattccgaggaaaatcaacaggatttccgtattcctgttcctagcttttattcttgagagcgagtaatgttgcttttgagtgccgaagcttccttcaagccgggtggccctttcttttgagagttcgcatctaagcaccttcctcaaaggctcatcttgggccgcccttcccttgcgcacaaaggatgtggatatcccatattttgtacagaactttctgttggcattattggcatatatggaatcggcagccacacatcttacccttacattcatcagcttctgctgcatacggagaaagacgtttctggtaatcctgtgtatatcggagtaaagcaccgtactcgctatggatcccatccctttgactgaggagtttttcaagaagcttgatcatacggcgcttaagcattcttgtccttgaagctctcctctttcttttcttgcagtaggacagataggattccgccacattcctgtatttgttgcgcggacgccttatgcccagagatccctgcaatgccggcatatatgcctgtagagccattcgatgctttcctaaaggagtttgtttattattcttgatttgacactttcaaggaaaaatagaaggtggtacctttcccttcttcggaatcgaaccagagcttgccaccgagttgttcgacaaagtctttacacagcattaatcccaagccagatcccttttcgttatttgtcccataagaagtaaaatgagtgtttgacctcaatagcttaccccggtcttcttttttgatccctttacctgaatcttttacactgacaacgacaaaatccccgtctgttttggttgatactgtaatcaaacctttttcgtagctgaacttgactgcgttggaaatcaggttacggacgatagtttttaccatatcgatgtctgtcgatcccatcagttctttatccagaccttcaagcatgatggatatgcctttctgggtagccattggaataaatatctcggcagtgctgttgactatgctgttgatgtcgacttgttgcctgtaaatgttctgtttgttcaggcgattctttgcccacttcaagaggttgtcgagaagctggaatatttcttccgatgtcttgttcatcatctgaagcatttcgtatacctcatcgctaacctgattcttatcgaccatcatcaggatggcgttattcatcatcttcaaagaaccaagcggagagcgtaaatcgtgtgcaataacggaatagagcgtgtcgcgggattcgatcgtattttcaagttcttgcttgatacgcttgatactgaacagttcgtaacggtgggcgacacgtttcaccaattcttcccgttggaaaggttttgttacatattctgttgctcccaactgataaccttttacgatactttgcatatcgctcaaagctgacatgataatgacggggatgttgttggtttccggattgtttttcaaatgctgcagtacctcgtatccgtccatctctggcatcataatatcaagcagaataagattgggatgcctttcttgggcaatgcgtagcgctttagctccgctatctgtcgtcagtagcgtataaccttctttttttagtatcgcttgcacaagcataacgttagttggcacatcgtccaccactaatacagtatattgtgatgctaagttttccatttgattctgtacttttcttgatattcaaatactatcaatgatacaaatgtatttaattctgtcgacataatcgtctttttcccgaaaataaattccatttctgaagaataattttttatatattaaacgtgtccaactaaaacgcttgatatagggctttttattaaaattattatttaagtttgcactatgaaatcgaatttagttcttttagcgctcatattagccagctgtcagccggaaatgcctgtaacctcctctattctggtaaagggagatggtttgacagtccctgttaacaaggaactgtatggtttgaccattgaggaaatcaaccatgcggtggatggcggtatttatgcggaacttatacaaaaccggagctttgaagacggggttcctcccttgaattgcccgtacgaccctgtccgccgggttctgactaccccgaatggatggactattcctttcctgcgttctgattcggtaccgggatggcgttgcttttctgcgacgtcttatatgtatcccgatactaaggaattgattaatgacaagaaccggcgttctctgctggtttcggtgtctgcttcagccgaatcaggaaaaggaggtgtcattgccgaaggatatggaggaataccgcttcggaaaggtgagaaatatgatttgtctttttatatgaaaggagcctctatggcttcgaagaccgtaagtctgactttggccgattctaccggaaaaacggccctaagcgaagtttttcgggtagcaccagcttatgagtggaggaagtacaagcacacttttaccgcaacctcgaatacaaataaagccgtgttgacgataacgactgacagttcggctgttttctggctggatgttgtttctctgtttccgcaaaatacatggaaaggccgtccgaatggattacgtccggaactgatggaactgattgcagcattgaaacctgctttcattcgcttccccggtggaagttttgtagaagggtatacggcgggaacctatccggtctggcgtgaaaccgtaggagagattgccgaacgcaaacatttttggaatgtgtgggcatacggtacgacgaacggcatcggctatcatgaatatctccagatgtgtgaagatttggatgctgaaccggtctatgtcattaatagtggtgtgaccaatcaaagtcgtcgtccgcgttatgaagacataacggcaatggggaaactagtacaagatgccttagatgccatcgcttatgctaatgaaccggccgattccattatgggaactttgcgagctagtcacggacatccggaacctttcgaattgaagtatgtggagatcggcagtgaaaattacggaccggaatatacgaagcgtttcgagttgtttaaaaaagcgatccaagaggcttatccggaggttatggtgataagcagttccgacataagaggaaagaacagaaatgaatggtcagatactcatttttattcgagcgaatcatttttgatctctaatcacaaccgttttgttgccggacagtatacgcgccggatgcctcctgtctttatcggagagttcggcttgtccggtggggcagctcccggaagtttgcgggcggctattggggaggcttgctttcttgcaggggtagaaaacggacaggagattgtgaggtgtttggcttatgcccctgttttgggaaatacaaaatacaaaatagaacgttatccggtcatcttttttgacggtgaacagattgctctttctccttcttactatctgttgcaaatgtttagcagcaataggggagacgaagtgctgaagaccgaagtccgcacctatcagaaaccccaggtgaccttcggacgcgccggtatcgaaatgttcgataacagctatgaattcaaggaggtgaaaatagacaattcgccggttacggaaggggctgtcatgaccggaggctggacggtcggacagggtacgttgacgccggttgcaaacaggtggaactatatccttttaggcgatccgtctgcctatgactatacgttctcggcggatatcaggcggacgaaggggagcgggcaagtccaattccgtgtgcgtgacaacgggctgtctggagaacgaaatgactatatcgggttgacgattggttctggtgttgtagagttctatcgccaggcgggaggtgtgagggatacgttacgtacacctgttctttatccgttccaaagtaatcgttggtataacgtgaagatcgcttgcaaaggcgaacaaatcggttgttttgtgaatgacacgctggttcatgagacgatacttcccggcataccttcattggtttctactgcggcgttggataaggaggctcatacgattatactgaaggtgatcaatacgactcagcacgaagagaagacggagttgaacctgcaaggcgtcagtgtcaaaaatacggcggaaattattcagctcacaggagatcccgaagcgcgtaacacttacgaccaccccggcgtggtcgtaccggagacaaaagaaatatccttctcgttgagcggtcccaaagtgtacaatttccctcccaactcgattacgataatgaaattgaagatcgactgacagggcgactggcatcggattcaaaaccgatgccggtcgcgcgtccaaccgatgccgatccattgactgccggatgcctgccggatgaaataaaaaaggctacctcagtaatgaagcagcctttttccgtttagtatcgcattgattaatggactaacatttcaggagtgatcttgacaaacttgtcggagtcggctttgcgaagtttcacgctgccatcgttccagtttgagggccagccgccaatgatatgtcctaagaataccaccttgatttcatgcaagcctttcgacaatgcagccgaactgtcgtggcgggagaagcgtttcacttcacctgcattgttcactaacaatttgccgtcgatccatacttcttcgttgtcggaagaaatgtagtaaacgccatcttcagggatgttgacgtaaccagttgctatggcagcatattgtttgacaccgcgcatagattcgcttgacttgacaacactggtgatttcacgcaaatccttgataaccgatttcttccattcttttacgtctcccagtttggaagaattcaaaaacatgccgtcggtcacttgcatttccaatccaggagtagttttggcaacctctctagcgggggccaaagcttgcttttcaaccgtgatcgtacgagtcttactcatcttgccggaaggcaatacggaacggatcttcagaacgccggattccgtgaattcgatcggagcggaataggcggttgattccggagtcggttcggttccgtcgatcgtataaaccactttgaccggacgggtagtcttgaattccagagaagccttgtcggtgaaagcgacaaaatcgcatgagccgttcggttgttccggttgcggaatatggtagttgatgttcagttcgtccagacggaccaaggcattatccaggcgacgttcgaagtctttataatccttgcgtgccaatggagtccagccgatttcagccaatgccagcacacgcggataggcacgatattccaataggtcagtgttgtacatatattcggaccacagatttgtttgtacccccttgatcaaattagcttttccggtagcgaccaaagtatcgggtatcggattgtatgcatacactcttgataacggatcgtaaccgccgatagaaaccggttcgatcttcggatcaccttggaattggtcaatgtacatgccaccgcttcctggagtcatgatcgcttcatgtcccatgtttgcagcagcgataccgccttcttcaccacgccaagacatgacggttgcggaaggagcgaggccgccttcgaggatttcatcccatccgatgatctttttaccatgcttttcggacaggtatttctccatgcgctgaacgaaatagctctgcagcttttcttcggcagaatggttcttgtcggctttcagaccttcctcgcggatgcgcttctggcagagcgggcattctttccagcttgatttcgggcattcgtcaccaccgatatggatatattcgccggggaaaagaggtgcgacttcgtcgaaaacatcctgcaggagctcgaacggtttttcctttccggcacacaatacgatgtcttctaccccccagatgatacgcggggtggtcggttcgcccttgcaagacaattcgggatatgcggagattgcagccaactcgtgtcccggaagttcgatttcaggaacgatcgtgataaaacggtctgctgcatattttaccacttccttgatttggtcttgcgtataaaaaccgctatattccgttccttcgccatctatgcgtttggaaccgacttctgtcagttttgggtatttcttgatttcgatacgccagccctggtcgtccgtcagatgccaatgcatgcggttgatcttgaacaaagctaatacgtcgagatgtttctttacgttctctaccgggatgaaatgacggcaaggatccagcatgatgccgcgatattcgaaacgcggttcgtctttcactgtcacgcaggatgcagtccaggcgataccgtttacgactgccgggctctggatctcggctggaagcaactgcatgaacgtttgcatgccgtagaacaagccttgcggggtcttagccttaaccgtcacgccttgcggagtgacatccagcgtgtagccttcgtcgtttacatccagtgcctcgtcgatcgccagtgcaatgccgtttgaggcggccttgtcactgaccgttatctggtaaccggtggcaagattcatctgggcggcaaaatattcggcaacagttttagcttccggagtggaggcggagaaggctgtgtttttgcttagtttaaaactaccctcgttctggacgaggcttaccggcgtcgggattacattgatgccctggttgtaaggcatctgtttagttggcccttcgctgcacgacgcaaggatacaaaatgctgcgccggcacaaagtgataaaaaagttttcattttggaatttatgtaatttgattgatttagaaagaaggaagaaatttatgatttttgatttacgatttatttccgtgccgcataaatcataaatcaaaaatcataaatctatagtgttaccaagcgaagataggatattccttcatgatgccgttcactttttcgcgaacagccgtgatagtcttgtcgcattcgggtgctgccagtacagtgtcgatcagttcgacgatctcggccatcagcggttctttagcgccgcgggtcgtgatagccggagttccgacacggatgccggaagtctggaatgccgaacggctgtcgaacggaaccatattcttgtttacggtgatatcggcggctaccaatgccttttctgccaccttgccggtcagttcggggaacttcttgcgcaggtcgatcaacatgctgtggttgtccgtaccgtcggagatgatcttgtaacctttgtccatgaatgcttttgccatagcagccgcattggcttttacctgagcctggtaggtcttgtattccggttccagcgcttcgccgaaggccacggctttggcggcgatcacgtgttccagcggaccgccttgtatgcctgggaatacggcggaatccagcagttgggacatcttcttgatctctcccttcggtgtcttcttgccccagggattctcgaaatccttacctaacaggatgatgccgccacgcggaccgcgcaaggtcttgtgggttgtggaagttacaatatgggcatattccagcgggttattcagtagtccggctgcgatcagtccggcagggtgagccatatcgatcatcagaagggcaccgaccttgtcggctatttcacgcatccgtttgtagtcccactcacgggaataagcggaaccgccacctacgatcaatttcggtttttctcgtaaagcgacttcttccatctggtcgtagtctacacgaccggtgtcttcttttacattatattctgtagcgtggtataaaataccagaactgtttacaggagaaccgtgagaaaggtggccaccgtgtgccaggtttaggcctaagaatgtatcgccgggattcaggactgccagaaatacggctgcgttagcctgtgctcctgaatgcggttgtacgttggcccactctgcattgaaaatctgtttcaaccgttcgatggcgatagtttcgctctggtctactacttcgcaacctccataatagcgcttaccgggatatccttctgcgtatttgttggtcagacagctacccatggcttgcatcacctggtcgctgacaaagttttcggaagcaatcagttcaatacctttcagttggcgctgatgttccttctcaatgatgtcgaaaatgatattgtctcttttcattacatgtaaaattggttattgcaatgagtccccttcttcttttggggggatcgttggcaaatttacgataaaaaatctatagcagggataaataatatcgaaatatccttataacttcaccacatttccttctttactgcttttccaggctgcctcgatcaggcggatgacaagcaatacgtcggcggcatccgtcaagagcggttctccgtggcggagatgacggtagatgttgtcgtaaaatcctgcataatttccggcaagactgggatatttgtaatggacgacgttgccgtctttctctgtgtgaagaagtccccaggtactttcgtcttcaactccccagtagggagtaccgggcatttgtccgtcattcagatccgcttcctgacggtccaggccgtatttgacgaatgagccttccgtaccgtgtaagatgaaacggggttctggttcgcacatcagatagctggatttcagggtgactttgacacgtggcgccttagacggacgaagtagatggatcacgaaataatcatctaccatgccgcctgtacgaatggtgtcgatatcggcgaaaaccgcatctggcacacctaacaattgaacagcttggtcgattatatgagcccctaggttataggtcaagccgccgcccaactctccggtttccttccatgttcccggttttataaagttgcgatagcgagggaaagttgactcgaactcaacaagacgtcccaacagccctttattcagtatttcccgaactgtaaggaaatccgaatcccaacgcctgttctgatatacgcttatagccagccctttggaccgagcgaggtcgactaattcctgtccttgctctgctgttgccgtgaaaggtttttcgacaatcacattttttcctgcctccagtgctttccgtgtatactcgtaatgcgtactgtctggcgtattgataacgaccagttccagctcatccaaagcaacgagctcttcaaaactgcgcacaatacgggctgaaggataacgctctttcgacagattcttattgcgctccgtgattgctgtcaggcagaaagctgggtttgtactgataaatggggcgtggaatatttgtccagacatgccgaaggctgccaatcctgtttttatcttttccatttttatgaaagtttatttttgcgaagatatgaatttatcgattacgatggcttacgatttttacagaaaacaaatagcgagttatgtttctaatgccttcgggacataacacgcaaccttggaaatttcgcattgctgataatgctattatgattgaagatattttattctaccaaatagagaaacggcagacaaatcgtagctacagaatacgtttaaagaatgtattgacgtagggtgaactctcacgtttttattgaaagctgccgagattgtgatgtcttatgtatttctgaatcagccatgtgagattacgacgttagcttctgccttacaagataggttgccgatcaatagggaattcccagtcttgatactcagaataggttatgcaaagccagttccttattcttcccgtaagaaaattgagacattgctaatttgatatttctactcagagtgacagcagaataattgaagtgaaaaaatatcagcagtttgtgaacaatgtaaaaaacaagactgtttatttgaggtatatgaagaatataaattcaaataatctaaaaaacatgaaaagtatgatgtcgtacacggacgctgaaaacgggaaggttgccttaatgcaggaaatattgggggtgaaagacatacaagatatcgacttgctctatgaattgcatcaggagtttatggatgcgcaaaagaatgcaggaacaggaaatagtgaagggcagagtgaacttttatgatttttcaaaaacaaaaaagaaggtgtgtcaaaattctcgagggcactgaaaaagtttccttgcagctttttaaagaattaaatctgcacatagcctgtatattatttggctatgtgcagattttttgtaccttaatgccataatatttaaggtccatgctatcaccacaacaagaacttccgctcagtgaatatagttcactctacgatatagttgtcccccaagacaatcttcttcgccgcattaatgatcttgtagatttcacttttgtctatcaggaacttgccaataagtattgcaaggataatggtcgaacagcagaatcccctattcgcatgttcaagtatcttctgctgaagaccatatacgatatttccgacgtagatgtcgtagagcgttcccgttatgatatgtcctttaagtatttccttggcatggctccagaggaagacgttattaatgccagcagtctttgtaagttccgcaagttacggctggaagacatggatcttatgaacctgctaatccagaagagcgtagaaatagcgatagagaaaggcatcataaaatcaaggacaattattgtagatgctactcatacagaagccaggtctaacccgtactccccgatagagattctgcgactccgttcaaagcaactccgtaaggtactttatgccatggataataatatcacgcaaaccctgccgtctaagaataaagaggatgatcttgcgcatgagttggattataccaaagaccttctgaaacttatcacttcagatgccagtctttcagaagtgcctgcagtaaagcagcgacttaacatgctcaaggaaacgctttcagatatagaggatcactatacgacctcaaaggatgcagatgcccgcattggtcataaaacagaggacagttcgtttttcggatataagactcacattgcaatgagtgatgagcgtatcataacagccgctactgttacttctggcgaaaagggcgatgggcctcagttgaaagagcttgtggagcaaagcagaaaaaacggaatggaagtgaacactgtcattggtgataccgcatactccggatcggaaaaccttagactggcagaagatgaagagaagggatttactttggtatcaaaattacatccggccataagtcatggactcaggaaagatgaagacaagtttgattataacaaggatgcaggcatgtttgtttgtcctgccggtcatatggcaatcagaaaagcaaggcaggggaaaaaggatgggaaatggaatcaatccatgacttatttctttgatatagagaaatgcaagacttgttcacgaagagaaggatgctaaaaggagggggctaaaagcaagacctatagtatacctatcaggaatgaagaacagaaaaggcagcttggattccagaaatcacaagaatttaaagatatagctcgtcaaagatacaagattgaggcaaagaatgcagaattaaagcaggtatacggttatgataaggcactgtcgtatgggctggatggtatgcagatgcaaggtgctatgaccatctttgccgcaaatatcaagagaatattgaaactaagctaaaaaacacttataaaaattacccacgtataatatgatggccttactgactatacaaggccgaatataaactcctatcaagatatataaaagcagattgcaaaaccgatataaaggctaatacaatctgctttcgtctttttaaagattgggattaaatcttaagaggatacctttttcagtgccctctcaaaattctcaccttcttttttatgcccaaagccccgactttcacaagctggggctttgttataacctgaagattttgtatctttaggcataagaatttatactatggcaaagatacattttcgtccttacaatcccaaccaaacagtgctttttcctcaaagaatagatgaggatattgcagataacgatccggtgcgcatggttgacgccctggttgagggcctgaatcttgaaagtttcaggaagctatataaggaatgcggccgcagcccttaccatcccaagatgatgctcaaggtcattctgtatgcctacatgaacaacgtctactcctgccggaaaatcgaaaagctccttcatcgtgacattcattatatctggcttgccggatatgagaaaccggatttcattaccatcaaccgtttccgcaatcgggtgaagaaggaaatcaacgaggtgtttacccaaaccgtactccttctctcttccaaaggatttatcagtttgaacgtggaatacattgacgggacaaagattgaatccaaagccaacaagtatactttcgtttggcgaaaaacggttgagcggaaccgagagcgcctgatgaagaagatacatgtcctgctagggcagatagacgatgtcatcgcccaagaaaagtattcggaaagtaatgaggaggttgagttcactccggccatgctgaccgaaatggcgggagaattacgtcatgtgctggaacaggttcccgagccttccaccaaggaggaaaagactgagctgaaaaagagacgcaaacagctgaaggagctggaagaacatagggacaaactccaggaatacgacagtcatctggacacgctgcaagagaggaattcctattccaagacggacaaggacgcaactttcatgagaatgaaggaggatgccatgcgtaacgggcagacgaagcccggttacaaccttcagatcggcaccgagaaccagttcatcaccgattttgcactcttcccgaaccctacggatacactgaccatgatccctttcctgcaatctttttcaaacaggtatgaccggatggctcatacggtggttgccgattccggctatggttctgaggagaattaccgcttcatgtcagagaacggcatggaagcttacgtcaaatacaactatttccacatggagcagcggccgagattccaaccggatccgttcaaggcagaaaacttctactacaatgaagaacataacttttgcatctgccctatgggacaaaggatgcggaggataggtactagacatgtgaaaaccacatccggatatgtcagcgaaaatgccaggtacagagccgtcagatgtgaaggctgtccgctaagatgccgttgttttaaagcaaaaggaaacaggacgatagaactgaatcacaggctcagaaaatacaggcaaaaagccaaagagcagctctgctccgaggaagggctgaaacacagaggacagagatgcatagaaccggaatccgtgttcggacaaattaaaaacaatatgaattacaaacgtttccgccattttggaaaggataaggtcttcatggattttgccttctttgccattgccttcaatataaaaaagatatgtgcaaaaatggctaaagaaggtatggattggctgactggactgttttatgagcttacagtagctatatttagatgctgcgaacacataaatcaaagaaatcctcaaaatatcgcagcttaaaaaaatgagccgatttttatagtcaacgaaaaaaaagaaggcgcatcgggtattacgacacaccttcttttttgtgaccgcgacaggattcaaacctgtaaccggctgatccgtagtcagctactctattcagttgagctacgcggccaatctttatattttcgtttaaactttatcttaaaatggtgaccgcgacaggattcaaacctgtaaccggctgatccgtagtcagctactctattcagttgagctacgcggccaatcttcattttcgtttaaacttcatcttaaaatggtgaccgcgacaggattcaaacctgtaaccggctgatccgtagtcagctactctattcagttgagctacgcggccattatttcgtgattgcgagtgcaaaggtagtactttcttttatattcgcaagccttttcggtatcttttttttaactaatcaagcatctttgggttaaatatcagataaccaatattcaagccaaaattaaaatttttagctggatagctgtatccgtttgcatacaggctgatgctagcgaaaggcagttgtaaaacaagggctgcttctcccatatatttaaaagaatgaaggaatttcccgtaataggggattgccgtgtatgtgttattgttccatacttcttctttttttatttcgtataacggtgcgaaaccgtacatgtcgaggcgaaagtgcagcagcttgctgaatttcaagatcggtgacaaaccgaatgccacgtattggttggcgcggaacgcctcgttgaagacaatctggctatgtggcgtcggtgtgaaggcaggtgcttgcaaaacggaagccgtatagttgttcatcagattcttgctggagagcactagttcactcataaaaccgaggttgaaatatggactgatcgtcttgtactgttcccattcacctttcatttgcagccagctatggactttccggtcgaatgagcccatatccgtaatgggagacggcatatacttttctgtaccggttacatattgtgccactaagaattgttttcgcccggagatcggatattgtttataatccagcgagttacgctcgatgctgagcgaaccggcaaacagatcatacctgctatgatcggtggtcgcgttcgggaatgtcatgttggaggtctggaaataataatcattcagccggccataagcaaaaccgatctcggctttggcacgattcaggaatgggaatcctaacttgaccttcgtgtacaattctttctggtggatgaaagccggtagtacgtcttcgtagaacaaagactggctttcggagtattttttgtctgagaatacgccttgccaattcagataggtcggtattctcgtctgcaaatagatacggccgttcaacatcacaccgctgaacgagttgccgacctggaagttggcgtttacatcggcggcatatcgtctcaaatactggtatcccagtccgagaaacagttggttggcctggtaggaggagatgttgcctccgaatccaaccgtgatctcttccttcattttgacatcaagatacaggtcgaacttcttttccttccgattataaacggcatggggcaatatctctttaatcttggaataggttagcattttgaaataagcacgcttgaactcttccatcgagaactcatgattgatgtcacgatggagttgggattcaatatatttcttttgcgattcatttacgcctgtcacatatatattctggaaaatcagaggaggaaggccttgcttataggccgcacggcgtttgttgacttcgcttagttccacacgccgggggacacgcgccttgatggagtcgatcatcgccatcgtccgtttatagccaatattcatcaaatcccgtgctttttgaaaatcgagcagggagacggtagggaagctaaattttatcatcataccttcgtcttcgggtacgtcgtattccgttttctgcatgatcattgtttcaagctggttataaggattggacgaaggtttgttgttaccgcctgccacagtcgaaccgaagatgaagtccggatggaaagcctccttcatcgggcctaccgggaaattgtcgtagataccgccgtcgaaaatggggacgctatctttccagatcggctggaaaaagaaggggaatgtcattgatgcacggacagcgtctccgagatctccatttttgaagataatagcttttttgctgtagatatccgaggccacgcaacggaatgggacaaagagattgtcgaaattccagccggcttttgctgtcgcttgtgaaaacagggccataaacgcctgattcatctggatcggattgatcagactttgtggaaggaaactggctttcacttgtaacgaatcggtcatgtctatggaaaagtgcccgaattccggtgtcgggtcggggcgtttgaaataatatttgtattcgttttccaccgttccggtttgccagtagctgaactcctcggagagcatcagttcaaccatttcttcgggtgtatatcccattgcatagagactaccgacgatcgcgccggcagatgttcccgttatgtaatcaataggtattccgttttcttccagagctttgattaccccaatatgggcggcacctttcgcaccgccaccgctcagaaccaagcctactttctgggcatatcctatttgtaaggccgcaaacaacagggctgtcagtacagctatttttttcatacttgtatcttctctgcttaatgaattcaaatgtagtcgttatttctcagaatacaagagtttgagatatataaaatacaacataaaattagttcgttttgttaatcttgcgaagaaacttggtgtcggccgttggtcaaaataagaaagggtgtcaaactttccattcccatatcaagtgcgggaatggggactttgacacccttttgctattttttccggcttcggtttaaccgatcatctgaacgctgcgtttgatgaattggctcaatgcttcacctttcaacataccgtttgccaacagggcaaggtcgattaactggctgaccagtttatttccaccagcatattcagacaggatgctggtgcgctgttctaccagttcgtcaatctttttgttcgtattcgtcatatcttccttctcttcagaagtgatttcttcttctttcttcttgctctgggcttcgcgcaagtcggactggcgggctttccagcctttcaggtcagaaaggatcggattcagcttttcggcacaagccgcttcttcttcgctcaggattttcttaaccagttcgtggtctgtgttcagcaccagattgtagttatccggcagttctccataaaacgacatacctggttgcatggcagacatttcgcgcatacggcgcatatattcgctttgtgtcagcatgaccgggtttgagttttcgcccaacgcctcgaatgtgacaatgaaatctgtcttctcgatcttcggtaactggcttttgaacatctcctgcagagcatttttttcgtcctcattcagtgttaccttgttgacatcgtccttgcggatcagattgtcgatcgtgtcgctatccacacggacgaagcgtgttttttcgaacttctgttccatctggcttatagcatggacatccagctgaccatccatgatcagcacgctgtaggctttgtcttttgcagcctggatatagctgtactggtcattggcatttgttgtgtacaagtagatcaggttgccttccttgtctgtctggttggcttccgtcagggctttgtactcttcgaatgtgtaatatttgccgtctacatccttcaatagggcgaacttggctgcccgatcgtaaaatttttcttcgctcaacattccgtactggatgaaaagtttcaggctgtcccacttttcttcaaattgaggacggtcgttcttgaacatttcttccaggcgatctgccacctttttcataatgtggttggagatctttttcacgttctggtcgctctgtaggtaagaacgggacacgttcagcggtatatccggagaatcgagcacaccgtgcagcaatgtcaggaattcaggaacgataccttcaaccgaatcggtgacgaacacttggttgcagtataattggatcttattgcgatgcagatcgatgttgctcttgatgcgcgggaaatacaggataccggtcagatggaacgggtaatccacgttcagatgaatccagaacagaggttcgtcggacatcggatacagatcctgatagaatttcttataatcttcatctgtcatatcagtcggcttacgaacccatgccggttggatatcgttgatgatattgtcttcgtcggtatcgacatatttgccgtctttccattcctgcttctttccgaatgcgatgggaactggcaggtaacggcagtacttagtcaacaggctgttgatcttgtctttgttcaggaaatctttgttctcgtcgtcaatatacaggatgatgtctgttccgcgatcttctttttccgtctcttccaatgtgtattcgggtgtgccgtcgcagctccatttcataggaacggctccttctttatacgatttggtgacgatctccactttcttggaaaccataaaagaagaatagaaaccaagtccgaagtggccgatgatggcggctgcgtcgttcttgtatttttcaacgaactcttctgcgccggagaaggcgatctgattgatatatttgtcaatctcttcggcagtcataccgataccacggtcggagattttgatcgtattgctatcgaagctgacatgtacggtcaaatctcccagttctcctttgaactcgccgacagaagccagtgttttcaacttctgtgttgcatcaactgcgttagataccaattcacgaagaaaaatttcgtgatcactatataaaaactttttgatgatagggaagatgttctcactcgtaacaccgatgtttccttgttttgccataatccgatataaaatattttgatgttatacttattgtttcctataactataattatttacgcaatgttcagttacaaaaacaatgccaaacaaacaaaatgacattttgactgacaagttatcagtatggagagggaaagaactggaatgtatataaaaaattaaaggctgtctcacgacaacccctaaccaactttgttaaccttaaatctaatactattatgaaaaaaccacattgcaaatgtacggatacttctataattgtcaatagataaaatattaaattttgttcttttggttttaataaaatctaatatcttcagatctcttgctttttatacgttattaggcttgtgagaaccatcgcaacggtggataaaggcaatgcgaacaggatcggatcgatggcgaaccagggatagatatcgatcaaaacatcacgcccagacagcatattgcataagccgactgctccggcttccgccttgtgaagaaacagcatggcaaacaaacttgccagtgcccccgtccataaactagccagtgctccttccttggtcgcctttttccagaaaagggaacagaagtaggccgggagaaaagtggcggcacaaatccccatgaacagggctgtcccgcgtgctatgactcctgcgctcagcgtataacagattatataacttaccagaatggagcaaagtactccgatgcgtacacccatcgtcgagttagcattctttcgatgtcccagtttagggaatatgtctgccccgaaagaagctcccatcgtgtggaactgggcgctgagcgtagacatacttgccgacaagatacagagcatgaaaacggcactgaaccattccggcattgcccggtcgataaacagcgggataatcttatccatatccttgatggcttccgatgcaaccacgccttctgttttcaggaaaaagaggttcgataatgccccgacatgataaatggctccgacggtcacgatcagaaaaacacaaccgatcagaacgccccggttcaattgcttggtgctttccaccatcataaaacgtacgaccaactgaggttgggcaaggcaaccgatgccgactcccaagatcagcgaggttacgagggtgtaccattgcggagacccagtcacaggcatggctgtccatccttggtgtcctacctccttaaaccgttcaggaacaagcggggcgatttccgtcagtttccggttggcttcgataaagcccatatccatcacccgatagaaccagaatagcaagaacagcatgcaggcgaacatgatgacggcttgcaaagcatccgtatataacacgcctttaatacctcccgtgatgacataggccgctactataagcgtgaaaataagcagtgccagatgcaagtctatgtggaacatctgttcgatgaacactgcacctcctttcattacgactgctgcatacaaaggcatgccgataaagatgatggcggcaataaatatctgtatggcacgcgaattatagtgcagccccaataattgcgggaatgtgcgggcattgtacttttcgcctaacttacgggtgttccgcccgaatatgataaaagcgatgacaacgcccataaacatattcaacaagcaaagccattggattcccataccgaacgtggccgcaacccctccgaaaccgacaatggccgatgcggaaataaaggttgccccgtatgaaagggccatgataacaggatttactttccgtccccccagcaaataatcgctagcatttttcgtttgtttgtatccgatatatcccagccaagccaggatgaacatatagataattactacgatacctaaagtcagtgtgctcatttttccggctgttgtgggttagtactctcctcgtcgtctttattccaatgggttattccgaaccagatggaataaaacaggcagacgagggctaacaggtaggccagccagatgccagggtcgcttattccgaacatgtattgttgttgtttataatttgatcaaatcactttcacaaatatattccagattctgacgacggatcacttcgcgagcggcttcccggttattcgtccgtaagatcaaaattgatttctcattggctgagaagcaatacatatattcgatactgacaccggctttcgtgaaacaagacaaagtctgggcaaaactgcctgcacaggagtttgtgacgattgccagcacatcggtcaggtttgcactgacattgttgcctttcaggattttataagccttttgcggatcgctgactataatgcgcagaataccgtattcggatgtgtctgctaccgttacggcaatgattcgtatcttctcttcggccagcaaagcgaggatttcgcttaatttaccgtatttgttttccagaaaaatagaaatctgattgactgtcatgttgattatgattttagatttatgaattatgagttcagcaaagtttacgcaagtctttcacccggacagcttttccatcctgtaccggcagggagcctttggcgaccagtttgagatggggagtcagaagcagctcgtctttcagctggcgggtgatttcctttgtcaagcgttgtaaaacgctgtaatcgtcggtaaacaggtcgctcaattccacttcaatcagcatctcgtcattgtttcctaccgtttcgattgtaattagataattgctacccagttctttaaactgcatcagtatcttttcgatctggatagggaagaggttgacccctttcaatatgatcatgtcgtcgctacggcctttgaaacgtgcaaggcgtttgtgcgttcgtccgcagggacattcacccggaaggacacaggtcaggtcacgggtacgataacggagcaaaggcattgcctctcggttgatggtcgtcaggaccatttcgccgacttcaccttcttttaccggttgcagtgtgactggatcgataatttctacgattacattatcttcccagatatggagcccgttctgttccgtacattcgaatgcgacgccggggccgttcatctctgacattccgaaacaattgtatgcttttacgcctaacaattgttcgatccggcggcgttgttcttccgagtgaggctcagcaccgatacaaacggtgtgcagtttggtgtcgcgacgaggatcgaggcccatttcatacatcacttccgccaggcgagtagcatagctgggaatgatatggaggcaagtcgtcccaaaatccgtaatgaacttgatctgccgcttggtatttcctgctgctgccggtacggtcaggcaacctaatttttcagctccgtattggaatcccaatcctccggtaaacattccgtaaccggaagtgttctggaatacgtctgtgtcgcgaatgcctaccatatacatacagcgtgccacctggttagcccattggtccaagtctttggccgaatgcaatacgactgttgggttacctgtcgtgccgctcgatgaatggatacggacacagtccttgataggaatagccgccatgccgtacggataattgttgcgaaggtcgtctttcgtcgtaaaaggaatcttttgcaaatcgtccagtgattgtatactgtcggctgtgatgccgttttctttgaaaactttgctgtagaaaggagaatttccggctgcttcaattgtttttctcaatcgctcaaactgtagctttttcaaatcttcgcgattcatggtttcaatatctttctgccaatattccatcgttttttgcattataatgtgtttgattcatgaaattagactgcaaatgtattgttaattttggagaaatcaaagatcagcccggtcagattcgtatacaacatagaggccgacaaggcagcggtacaggcggctgttgacacaaactacagtaatgccttactcgaagggacggtaaacagagtaaaaactattaaaaggacaatgttcaataaggctgggtaacaaagaacttgcgttttgtgcaaaacaactatcatactatcataattgaatttatatacctgtaaaacagtatattattctatgatagttcctgttttcaactatcattcatctatcataaccatgtaatcgtctcgtaatcgtctccgcgatgctacctttgccatttatgggggagtaaatttcttatagtctcgtgatctgtattgggatttatatcaatgagcttagtaagcaaatctttaaaatactcaaatgagttaatgttgttgagcctgcacgaacaagccagtgagtagatcagtgcagcccttttagccccctgatgactcccacagaataaggagtttctgcggcttaagctaatatatcgcattagtctttcaatcgcattattgtccggagcatagtctgcactgcggatataattgcataaagcatcatattcgtttaacgtatagttaatcgccttacttaattcacttttgggtaaagtcgactttttgttttttatatttatcagttcctcttttaattctttgaggatagggggagcatatttatttctatagtccagtatctggcgggctgtccagtccgggggaatgcggtgctcattttggtaaaggcgattgatgattcgtacgattttttcagcatccttgtttcctgttatattcaggaacttgcgtttgcaatgttggaaacaggataagcggatggcatccggataggcctctttttctattatcttgtaatttcctaatccgtcactttgtatagctccccggtagtcttccctgagataaccggtcaggacctttctggaacgtgaaccgttttcgtaaaagaaatgtaccagttttagatgattagccagtgctgcccaaatatatcctttggctgtggatttgccggatgggttgtttgtatcactggtaagaacggtataatagctctcgtccatactcagataattgtccgagaggacagtctctttgagaacttcttcaaccaggtcaaacagaccggccgcttttttaatcagtccatgagccgtagctttattcatctcaaagccatgctctgcgaagagtttgatgatacgttcgactggcatggagtagatatagcgcaactgcaggataccggcgatgaaggatgcatcataattagagttcaacaaggggacagctggcagacttccggcataaacagtgcctttacaggcataatagtgctggtgatagatatgcttgataaaacggggaggaataaattcgtagcggatgcaatctgtcgtacgtatttttttgccttcttccactttgaactctgctgcatccggatagatatcatgatggcaggtttccagattaaaatattctttgcgtctggctccgttgttccctctttctttcagattgggttttactttggctatgattgtcgttcctttatcggggacagagacctgttcggatttcttgcccgataccatctttcccaatatgcggactttactttgccggccttcaagggatgcattcttttccaacagggctttctccaacgagaggatggaactgtttaaggatttgacttccgcagtcaggatattgagctgttcattctgatctgcgatcactttcaacaactcctcttcccgctgcgcagccaatttcaactggtcttccaataagagggcaatccgcttgtaatccatgccttaaagatacggatagttcttccggcggcaaaatatttatgcttttatttataaagcggcgccctacaaatcaatagaccggactacaaacgaaggcgtttcctgtacttcactgaattcagagagatgcctgacatgatcatcatgaacgttttccattcgatcttattccagtcctcacggggattaaaacgggggagttcaaaggtcccgtcctctaaacgcttctgatataaaataaatccgtcttcctgccagcgcaacagtttgatcatgtcccgttttttaccacagaacaaatagacatctccgctgagtgggtttcctgtctttgtattgcgaaccagttcggataaaatctctattccacaccccatattgatatagtaagggtaaagataataatgcagggattcgttcagactaaacatttggattgcctgttacttgggtgtataattcaaaaagcttcattaaggccgaaggggtggtctcgcggatactaatggatacaccgtcagggaaagagaggatcgcacctttgatatattggtccaaaggaatattgcgtgaggatatgcaggagttcttgatcggaaagctttgccctgacacttctataagtgaacttttcaagttactgtcattaccgtttttttccaataatacttccaaacgtaaacttcctacgcttcgattatgacgatgcatccattgcatcactcctttataacgtaccccttgtttacggcaaaaggtttgaaaactgtcgtaatgagggcgatcttcatgcaaatgtgccttgtaggcttctactgtacggggaaaacgagtttctgctttcatctttttttgatgacaaagctaaatactcttgtttgaagaacaatggtagcatcgcggagacgcttacatcgtctccgcgatgctacctttgccatttatgggggagtaaatttcttatagtctcgtggtctgtattgggatttatatcaatgagcttagtaagcaaatctttaaaatactcaaatgagttaatgttgttgagcctgcacgaacaagccagtgagtagatcagtgcagcccttttagccccctgatgactcccacagaataaggagtttctgcggcttaagctaatatatcgcattagtctttcaatcgcattattgtccggagcatagtctgcactgcggatataattgcataaagcatcatattcgtttaacgtatagttaatcgccttacttaattcacttttgggtaaagtcgactttttgttttttatatttatcagttcctcttttaattctttgaggatagggggagcatatttatttctatagtccagtatctggcgggctgtccagtccgggggaatgcggtgctcattttggtaaaggcgattgatgattcgtacgattttttcagcatccttgtttcctgttatattcaggaacttgcgtttgcaatgttggaaacaggataggcggatggcatccggataggcctctttttctattatcttgtaatttcctaatccgtcactttgtatagctccccggtagtcttccctgagataaccggtcaggacctttctggaacgtgaaccgttttcgtaaaagaaatgtaccagttttagatgattagccagtgctgcccaaatatatcctttggctgtggatttgccggatgagttgtttgtatcactggtaagaacggtataatagctctcgtccatactcagataattgtccgagaggacagtctctttgagaacatcttcaaccaggtcaaacagaccggccgcttttttaatcagtccatgagccgtggctttattcatctcaaagccatgctctgcgaagagtttgatgatacgttcgactggcatggagtagatatagcgcaactgcaggataccggcgatgaaggatgcatcataattagagttcaacaaggggacagctggcagacttccggcataaacagtgcctttacaggcataatagtgctggtgatagatatgcttgataaaacggggaggaataaattcgtagcggatgcaatctgtcgtacgtatttttttgccttcttccactttgaactctgctgcatccggatagatatcatgatggcaggtttccagattaaaatattctttgcgtctggctccgttgttccctctttctttcagactgggttttactttggctatgattgtcgttcctttatcggggacagagacctgttcggatttcttgcccgataccatctttcccaatatgcggactttactttgctggccttcaagggatgcattcttttccaacagggctttctccaacgagaggatggaactgtttaaggatttgacttccgcagtcaggatattgagctgttcattctgatctgcgatcactttcaacaactcctcttcccgctgcgcagccaatttcaactggtcttccaataagagggcaatccgcttgtaatccatgccttaaagatacggatagttcttccggcggcaaaatatttatgcttttatttataaagcggcgccctacaaatcaatagaccggactacaaacgaaggcgtttcctgtacttcactgaattcagagagatgcctgacatgatcatcatgaacgttttccattcgatcttattccagtcctcacggggattaaaacgggggagttcaaaggtcccgtcctctaaacgcttctgatataaaataaatccgtcttcctgccagcgcaacagtttgatcatgtcccgttttttaccacagaacaaatagacatctccgctgagtgggtttcctgtctttgtattgcgaaccagttcggataaaatctctattccacaccccatattgatatagtaagggtaaagataataatgcagggattcgttcagactaaacatttggattgcctgttacttgggtgtataattcaaaaagcttcattaaggccgaaggggtggtctcgcggatactaatggatacaccgtcagggaaagagaggatcgcacctttgatatattggtccaaaggaatattgcgtgaggatatgcaggagttcttgatcggaaagctttgccctgacacttctataagtgaacttttcaagttactgtcattaccgtttttttccaataatacttccaaacgtaaacttcctacgcttcgattatgacgatgcatccattgcatcactcctttataacgtaccccttgtttacggcaaaaggtttgaaaactgtcgtaatgagggcgatcttcatgcaaatgtgccttgtaggcttctactgtacggggaaaacgagtttctgctttcatctttttttgatgacaaagctaaatactcttgtttgaagaacaatggtagcatcgcggagacgcttacataaccatcatgggcaaaagcaataaagcattgtatatcaatattccgtcaaatttcagatatgttctgaagctgatacaaaatagattaaataggctcgttttttcatgaagacaggctgttcttttaccaaaaacaacttgaaaaattccttcagacccgggtggaagggtatgggagatccgggtgtggaggaggtggagacccggatcttcgtgaaaccgggacggggatgtggagctgtttatctgccttgtttgaggagattttatgcactgtttctgattaaaaataaccttcattcgcccatttctcttgtcttaacagtctcccgcatatttacggggataattgaatgtgatagccagcaaagctccgacacccaacaaataaggataatataaatactgcatgatctcgatgggagagacatgccctaaacctgccgccatcaataattgcgcgccgtaaggtatgatgccttgtacgaagcaggaaaaaatgtccagcagactggcactgcgtctcggatcgattttaaaacgatcggcaatatctttggctattgggcctgccatgatcaaagcgatggtattgtttgcggtgcaaagatttgcaaagctgattagtgcggcaatactcccttcggctcctttggtggaacgaatgcgggaagtgagtttcaagatgatccaatcgatacctccgttatatcgtatcatttccagcattccaccggccaataaagtcacgatgataagttcgcccatatttgtgatgcctaaccccattgatgcattccatccccagatatcgaatccgcctgtaagcaatccgacgataccggaaagaatgatcccggctattaggaccatcatgacattcacaccgcagatagctgttatcaggacaactaggtagggcaggaccttgatccattcgatcggccctgtttcatatccgctcccgaccccactcccgatcagcacatagagaagaccggtcaggatggcgatcggcagagcaattcgaatattcactctgaacttgtcgttcatattacaaccttgtgtgcgggtggcgacgatagtggtatccgatatgaaagacaggttgtctccaaacatggctccgcttactacgacacccagcatcagggcatctggcattccggttttgtcggcgatccctacggcaacaggagccaaggcaacgattgttccgacagatgtcccgacagaaatggaaatgaaacaggcagcaaggaatattccggctgccaacaaattgccaggtaggatggacatggccagattcacggtagcatcgactgctcccatcgctttggctgtttgggcgaaagcaccggcaagaatgaagatcaataccatcagcatgatattgctgttggctgccccccggcagaattgctcgatccgattgctgatcttaccccctttggacatggcgatggcaacaactgaggcgataacaaaggctacggtaataggcatcttatagaaatcgcctgcaatgatggacactacaaggtaagacaataaaaaaacaaccaaaggtgtcagtgcccaaggattaggggcatggtgtaaacgtgaactgttcagatctgtcattcttaattaaaccgcatgttagaaagtgaatcttaatgcaatacggatacctcccttcttaatatcaggatgatccaaataagttaagcgtctgtaataatcaatgcgcaggatcttgaatatattttccaaaccgacgctgcattccatatatggagtgctacctaatggctgcgtcccatctggtaataggaaaagtcccggcgtcaaggtcggattatttttgtccgtcagtccaccatagatcatattaaaggataggacttcacgcagacgcaaccacttgatgcccggaatacggttcagaatccaccccttcagataataagtagcattgaacgatacatattggtcggtcacaaactccaacgcgttcatcatgtggaatgcttccggctggattgtgatagattggttcgtattcggcaaaatcaacagggggaaaggtatcttgtcccagaccttgcccgctttaatctgtgcatcgatatgcccaaacgaagaaagccagatacgtttctcggcactgatctccgtatggttgtaattgtaatcgccgcctaacacgcctttaatacctaattgatgggagagcttgaatacaggggcatctttagacaggttgaatacggattctttccccgaacgcccgttataagcgcgttcacccggagcgaaacgcaactgtgtcccgatttcggatgtcgtaaaatcttttatatggtataaattcccggattcgtcccgtttaatatattgaagcgttcctgccgcctcgttgttctgattcattatccaggacttccatgtcaggccgttcagccattctttttcgtattgcaatacgcttttgcggatatattgcatcttggtcaccggttcacctactttccaggcaacgaatatattatctttgcttgtgaaaaggaaatcttggcctggggtatacacgtcatattcttggatgaacgacagattattaaccggattttcaccttcgtgatattcttttttagtgaaactgtgtgttaacttcaaattgtatttgatcttgcggtcatttgtaccgtaagccagataaccgcttgcaaaccaatacggattgaggttggcagtcgtcattcctcccacacgcatacgaaaaccttccagatggtttgcactgaaggtcgtattcatcggaccgaagtcgaatttggtcaccttcttgtcatttgctgtcgggatatagcccgttatcaggatctctgcggttttgataatggcattgaaagccggaactttccgcagttgtcccaataaatcttttagcgcatcttccttctctttcaatggaatagggcggttgtgcgtccagaacgtatccggctgtgccgtcgcttccggcaagacatgcaatgcccctaagagcccgaaaacggaatctgcattttgcacgttgaaattataattgtcgtaattcctgagctggtgcgcatagagctgttgcgtcccctttaccacatagaaattgacgaaagtattctcttggtcgagcacccaggtactatctggcatctgcttgaattcctgctcaatacggagtttgtccacccaatttaggttgatgtttgcaggggtgttcagcaatactttcttgaccgcataattaccgtcaagcgtgatataaagccgtcccgtaaaaccgtagctttcgctgtttgccggaacgaaagccagatccacacatttatctcctcctacatcgagcgtatccatgatgtaataatggtaatatgtggtcgccaatgtcgatgataatgggctgacgaaccgattcaatagaataggaatattgttatcgaaaatattgatactcttaaaaatctcttccaagttggaggttatgccgccaccgtcgtctaatgtcttatcgatcccctgcatgcgtttggctctgacaattgtcttttccgctttgggacttttccggtagtagaagtctgataggttttcacgcacggagacggtcaggatcggtttgccgttaaactcagacgtgtccagatagtttttgataaatttgaactttttcagaaatttgttcttgtcgagattcggattgaaattatccagcgacagacttagtttttcgtatacttccgtttgatattccggctttgcctcgatccggttgtcgttcttatgtgcaattacttttttgataagctctacagccggattatccttgcgggtatatttttctcttttgggtttgaccacgacttccgaaatctcgaaagcagtcggcttcaacaatacttccaaattgtcattctttttaccgggcttgagatcgatgaatttagtatcgtatcccaatgaggcggcggccagtttggtatagccctgattgttttgaagggtgaatgttccattgtcgtctgtcatagctccgatagttgacccgtcaaaatagacggatacgaatgggagcggttcaccggtaatagaatctttgacaataccggatgccgaggtaaaactctgagcgtgtgatagaaaaattcctgctacagcttgtaacagagctattaatatgatataacggataaatcttaccatgtatttaacgttgttccttctcggatatggacaacaaagataaggtttttttggttacagttttactggcgatattaataatctttaatcgaaagatagtctgctgattaaatgggggggctaaatatcaattatacgtacaaaatccgaaacatatttctttttatttgcttttaattccgctaacggtttttatccttatatttgttctgcttgaaaacgtaaaaaacaggtcctaaagaaatgaaagaacatattagaaaaagaaaaatcatggctgtgaccttgaccggatctcttgccaactttctgctattggttttcaaatttgtagcaggtgtgttagggcacagtagcgccatgatcgcggacgccgtccattcgctatccgattttgtgacggatgtaattgttttgctcttcattaatatatcgtccaaaccgaaagacgaaggccatgactatgggcacggaaagtatgaaactttggctactacgatcattgggattgtcctgatgtgtgtaggagccggccttttctgggatggtgcgaacaaggtatttggattttattttggaggcgaacagttggaaagtcccggcaagatcgcacttattgccgccattatctctattttgataaaggaaaccctgtatcgtctgacgctatatgtcggaaaaaaagaaaatagccaggctgttatcgcgaatgcctggcatcatcgttcggatgctttttcttctatcgggacgacgttgggtattggaggagccatcctcttaggtgataactggcgtgtgctggatccgatagcagccgtgattgtcagcatattgattgtaaaggtagcctttcagttggtcatacctgcaattaatgatttgctggagaaatctttaccgactgaggtcgaagataagattctctctataataaatgaaacgccggaggtcaggaacccgcataatctatgtacccgcagaatcggtaatgattttgcaatagaagtgcatatccgggtcgatggacaaataactgtaagccgtgcgcatgagctgacgaaggagatagaaagtaagttacgtttgaaatttgggcctgcaacccatatcgtcttgcatgtcgaaccgataaaagagaaaaaagatgagtgaactgacattataccggggagaagtttttgattttatcgattctccgttaaatagaaaagatgcttaccgatattttcccgatggagcattggtcgtacgggaaggagagatagtcgattgtgggccttttgaggatattaaaggccgttataccgattatgaactggttgattattccggtaaactcctgatgcctggatttatagattcccatattcattatccgcaagctgaaataatcgggatgtacggaaggcagttgctggattggctggaggactatacctttccagcagaacaggcgtttgtttcttcagagcatgcggataggatggcccacttctttgtagaggaactattccggaacggaacgacagcttgcatggcttatgcaacggtacatccaacatccgtcaccgctctcttctccgttgcgtcggaatataatatgtgtatgctgaccggaaaagtgctgatggaccggaatgctccggcaggattgaccgatacggcggaacaggggaaatccgaaagtcgttctttgatcgaatcttggcatggaaaagggcggaaccgctatgtcatcacgccccgttttgccatttcctgttcgacggaacaactgattgcggctggacgtttgcacgaacaatatcctggcacttatatacagacgcatctttccgagaataaagacgagatcgacagcacgctttccttgtgtcccgactgccaagattacttggaagtatacgagcgggcaagattggttacagaccgttccatcttcggacattgtattcatctgtctgattcggaatgccgtcggttggtcgaagccggttctgtcgtagcccattgtcctacatccaacctctttttgggaagtggcttgtttgatatgcaacaagccaatcgtgtcggtatgcaaaccgtattggcgacggacatcggagccggaacctctttttctatgctgcgcacgatgggagaggcgtataaagtgcagcaacttggcggatatccgatgtctgtattcgagtcattatataaatgtacgttgggagcagctaaagcacttcatttggatgatgaaatcggctgtttcgggaaaggccggaaagcggatttcattgttatggattatgccgccacaccttcccagcaggtacgcatggactatctgaaacgccacgggaagtggacgttggaaaataaactgttcggcctgcaaacagctggagatgaaaggaatattcaagccacctatgtgatggggaaaagagtattcacccttgcttagaatacctgcatctcgttcctgacagtcgtgacaccaattagccgatcatagcgagcacccatcggacgataataaacatagatgctatattcattttgtgtctggtagtaattaccttctatcggacctgtctgaccgacagaggaaccggtcgggacaaacaaatactggtaattgtaacttccctgtttgagaagtacggctttttcgtattgcttcgtctcgaagttatagcccattttgctcttttcatccaatacattattaaatagctcaccgttcagatatacactcccatcgggcagcggatcgcatgcaagtgtaaaatgcacgatataataatccgcttccgtatccggatcgttacagtcgctgcaacgaatgaagaaacggccgtcctgatcctggtcatattggtaagtgcctttatcccgcctgtaatcggtcataagttccacattatagtaaggattgtggaaggagatattttcgacgtgcattccattatatttgttgcttaggaactccatgcgacgatactcattcccggcagggaaaataaggttgcggttatacgtgtaagatatttggttttccagaatgctcataggttgcaagtccgttacggcattatcgcgccggttgtcctggtaaacgaatatcttcaggtccgtttgcggataagtgatcggaaaatttttgttgttgatgttgaaacttacctgctgatggctctggttggtgtcgatgtccgtgttcccgctcaccgaagccgagatattgacaaccggttctaccacagagaaacaggctgtaaaaatgatctggtccggcgtatcctcgttatagacctggatggcataattgccggaaactttaaactggacatcgtcgttcggaagcaatagccggtagttcgaatattgagtcgtagtcccgatggaattggcaaaatcgtcgattgttgttccttggaaaccattcatatattcgatcggactcaactgcgattgcgtccagtcggcgttgcaatgcaccacgttataggcatatcgtgtgtatccactccccaaaccgtcgaaattgatttcaatttgctcttctcctcccaacgctatgtaaggttcggatatcaactctccggcaactttcacctgaagcgtttttatctgcttgctattgacatcggtgaagaactttacctgtgcgtttgccccgatggaaagggcaaaaagcatcataaatagtaaactgtacactctcattttcatatttctttctttgtcggtgcaaaattatggaattatttctttaattattttccattccctgctttaaagcataaaaaattgcttacttttgcgggaaaattacatataaacaattttagttgtatcatggcaaatgtgattaagattaaaaagggtttagacattaatctgaagggcaaagcttcggacgtactgttaaacggagggaaaagcgatagttacgctatcgttcccgattattataacggtattgtacccaaagttgttgccaaagtaggagaaaaagtcaaagccggttctgtattgatgatcgataagaaccgcccggagatcaagtttgtttcgcctgtcagtggcgaagtaactgccgtaaatcgaggagagaagcgtaaagtgcttagcgtggttgtcaagccggaagcgcagatcgagtatgaagatttcggtaagaaaaatgtagcttccctcaagagagaagaggtgaaggaggcaatcttgcacgctggtatgtggccgtttatcaaacaacgtccgtacgacatcgtcgcctcgccggctgacgaaccacgtgacatctttgtttctgcattctattccgcaccgttagctccgaacttcgatttcgtcgtgaaaggacaggaagttgattttcagacgggattggatgcgcttgcaaaacttaccgacggcaaggtgtatgtcggcatccgcaaaggttcttccgttagtgtgaaaggtgttgaaactgtagaagtggaaggtccgcatcctgcggccaatgtgggagtacagattaatcacattaaacctatcaataagggtgaagtggtctggacggtaaatcctgccgacgtgatcgttatcggccgtttgttcaataagggcatcgccgatttcagccgcctggttgtgataaccggttccgaaacgacagagagaggatacgttaaggcaattgccggctgtacgatcgccagtctggttgacggaaagatcatgagaggtaacgaagatatccgcattatcagcggtaacgtgttgactggtacgaaggtagaaaaaaacgattatttgggagcctatgacaatcagattacggttatcccggaaggtgacgaaacacacgacttcttcggctgggcgactcccggtttcggaaaattcagtgtgagccattcattccccgcctggttgatgggcaagaacaaggaatatgtgatagacgcccgtatcaagggaggcaagcgtgctatgatcatgtccaacgaatacgatagcgtgtttccgatggatatcatgccggaatacctgttgaaggctattatcgcattcgatatcgataagatggaaaacctgggtatatatgaagtagcgcccgaagattttgccctttgcgaattcgtcgatacgtccaaactcgaaattcagaagatcgttcgtcaaggtctggatgtattatacaaggaaatgaattaataacattaaaaattagaatacattgaaagcgttaaggaattacctcgacaagattaagcctaactttgaggaaggcggaaagctggcgatgttccgttctgtttttgaaggtttcgaaacattcctgtttgttccgagcacaacttccaaatcaggcgtacacattcatgactatattgactcgaagcgtacgatgaccgtggtcatcattgctttgttgcccgctttgctttttggtatgtacaatgtcggttatcagcataaccttgcaataggagctgatccgggatttctcatgacttttatttttggttttctggctgtattgcctaaaatcattgtttcgtatgtggtaggtttgggtatcgagtttgctgttgcccaggtgaagaaggaagaaatccaggaaggttttctggtttccggtatcctgatcccgatgatcgtccctgttgacactccgttgtggatgatcgccgtagctactgcatttgcagttgtttttgccaaagaagtatttggcggtacaggttataatgtatttaatgtagcgttggttacacgtgcattcttgttcttcgcatatccggcggctatgtccggtgaccaggtgtttgttcgtacggctgatacgttcggtatcggtggcggacaggtggtagacggcttctctggcgcgactccgctgggacaggttgctatcgcaggcaaggaactgatcggttcgttccaggcagtcgatgttctcggacatccgatttccacatgggacatgttcttaggtctgattccgggttcgatcggtgaaacatctgtattggcgatcctgatcggggcggttatccttcttttcacaaagatcgcaagttggaaaacaatggtttccgtatttgtgggtggtgcggtcatgtcgcttatcttcaatatgatcggaacgacggtggccatgtgcgtatctccgttggatcatttgttcctgggtggtttcgcattcggtgccgtgtttatggctaccgatcctgtcacttctgcccgtacggaaacaggtaagtacatctacggattcctggtaggagctatggctattattatccgtgcattgaatccgggttacccagaaggtatgatgctcgctatcctgttgatgaatgtatttgctccgctgatcgactattatgtagtggaagctaacatcaaccgcagattgaaacgtgtaatcaaataaagtaagaaggagtatggcaaaatataaatgtaaagtatgtggatatatccacgaaggaaataaagctccggatgtttgtcctgtatgtgcagctcccgcttccgatttcgaagaaatgaaagacgaggctgctgccgacaagaaaaagggattggacagagacagtaacgtgtatactgttgtttatgcttccgtaatggttgttctggtcgcagtcgtgctggcctttacttcgcaatcgcttagaactttccagcagaaaaacgaggaaaacgacaagagacagcagatcctgcgctccatcaacgtgacggttccggcaaatgaagccgaagctaaatattcggaattgatcaaagaagcatttctggtaaatgaaaatggtgaaaaagtagaaggtgacgcttttgccgccgatgtggtgaaggctgctgccgaacaccagtatccggttttcgttgcaaatgtagatggccagcctaaatacatcatggctttgcatggtgccggtttgtggggaccgctgtggggatatatttctgtagacagcgataggaatacggtttatggtgctgatttcagccaccagggtgaaactccgggattgggtgctgaaatagcaaaacctgcattcagcaatgaattcaagggtaagaaactgttcatggacggtacattcaagtctattgcggtcgttaagcctggcaagagcgttgccggtcaggattatgtagacggtatttccggcggtacgattacaagccagggagtacaggcgatgttatttaatagtttgaatggttatgttaagtttttaacctcacaaaattaagtagaaaatgggattattatctgaaaagaataaagaagttctgttaggcccgcttagcgtaaacaacccggtcatcgtccagatgttgggtatctgctctgcgctggctgtaacatcaaaactggagccggctattgtaatgggtatttcagtaacggctgttgtggcttttgccaacgtgatcatttcactgctgcgtaatacgattccaaaccgtatccgtatcattgtgcagctggtggtggtggcagcattggtgactatcgtgagtgaagtgctgaaagcgtttgcttatgacgtaaacaaacagctttcagtgtttgtgggtctgatcattaccaactgtatcctgatgggacgtctggaagcatttgcactgggtaacggtccgtgggaatcattccttgacggtatcggtaacggtttaggctatgcattgatcctggtgatcgtcggtttcttccgcgagctgttaggttccggcacgttgctgggattccaggttattccgcaggcattctatgacttcggttatgtgaacaacggtttgatgatcctgcctccgatggcattgatcgtgatcgccgtgattatttgggttcaccgttctcgtaacaaggaacttcaggaaaattaatgctaactattaaaaaaataatagaatggaagaattattaagcacatttgtccgctcgatctttgtagacaacatgattttcgcatactatctgggtatgtgttctttcctggctgtttccaagaacgtaaagactgctttgggattaggtatggctgtgacgttcattctgacatgtacgttgccgatcaactatatgcttgaaaattatgtattgaaggaaggtgctctgcaatggctgggtgctgaattcgctggtgtaaacctgagcttccttgctttcattatctttatcgccatcatcgcttcgtttacgcagctggtggaaatggtagtggaaaagtttgctccggctctgtacgcttctctgggtatctttttgccgctgatcgctgtaaactgcgctatcctgggtggttctctgtttatgcaacaaaaggcatttcctaacgtaggtgttgcaactgtttatggcttaggttctggtatcggttggatgctggctatcgtcggtatggctgccatccgtgaaaagctggcatactcggatatccccaaaccgttgaaaggtcttggtatcacctttatcatcacaggtttgatgggtatggcattcatgtgcttctcaggtcttaagatataatattaacgcattaaacttattacagaaatgactttattaatgacgactggcagtcttacaatcgcagcaggtgccgtgatcttcttggtgattacgctgatcctggtgggtgcgttgttggcggccaaagcaaaattggtaccgtcaggaaatgtagacctgaaggtaaatggagaaaaagatattgagactccgataggaagcactttgctggctggtttgcaaagtggtggtatcttcttgtcttcagcttgtggtggtggtggtaaatgtggccagtgccgtgcacaggtattggaaggaggcggggaaatcctgccgacagaaaagggctttttctctcgtaaacagattaaggaacactggcgtctggcatgtcagtgcaaagtgaaggaagatatggtcgttcaggttccggacgaagttttcggtgtaaaggaatgggaatgcgaagtcatttccaacaagaacgtggctactttcatcaaagagtttatcgtggcgttgcctaagggtgaacacatggacttcctgccgggttcttatgcccagatcaagattccggcatacgcaatggattacaacaaggatatcgacaagtcgctgatcggcgaagaatatctgccggcttgggaaaagttcggtttgttcacgttgaaatgcaagaacgacacaccgaccatccgtgcttactctatggccaactatcctgcagaaggtgaccgcatcatgttgacggttcgtatagccactccgccgttcaaaccgaaacccgaagtgggcttccaggatgtgatgccgggtatagcttcttcttatatctttaccctgaaaccgggtgataaggtgacgatgagcggtccttatggtgatttccatccgatcttcgattcgaagagagagatgatgtgggtcggtggtggtgccggtatggctccgcttcgtgctcagatcatgcacatgacgaagacactcaagactacggatcgcaagatgtcatacttctatggcgcccgtgccttgaacgaagtgttctatctggaagatttcctggaaatcgaaaaggaattcccgaacttcacattccatctggcactcgaccgtccggatccggcagccgatgcggcaggagtgaagtacacggccggtttcgttcaccaagtaatctacgatacatatctgaaggatcacgaagctccggaagatatcgaatactacatgtgtggtccgggcccgatgtcaaaggcagtggaaaatatgctggacaatctgggcgtgccgcgtgaaatgttgcatttcgacgatttcggcgcgtaacagatcattcgaaacatgacaataatagaatcggggaaggatatttattctttccccgattttttttgaactattctgtgtattaacctgttatccataaaaatcaagggataaggacgagttgttacgaaagaattacaaagaaaatacatttcttttgtaatatagtgcagcgttttgcgttttgaatacatcatacttatatatgatattaaaattgtaatagaatatgaaagcattgatattatctttttttgcagtaatcttaggttattcactaatcttcgatgagaagaaaacaactgaccaacctgtcataaaggatagtaattccgtgtatgtcgacagaccggccaatatgcagatgtccgattccattatgatatatagggatcagaccgcatccgttctgtaagttttagttagagttttgttgtttacccgtgttgttttgcttttgtagtatcactctatcacccggccgggcgttgcctttgtttttcaatggcgataacaagtgatactattttgttttctctatcacacttctatcacaccctatcacaagacatccgtttcttttttgagagaaataaagggatccgtttgtagaactaacggtcttatttttagtaaactaactacatttgtccgtaaacatccgggtgtagggaggacggacatccggatgttcaaggagcctacatccgggtgtacaggcgtgaagatggggatgcagaggattttttccgccctgttttgacaaaaaaggtcctggcatttggatgtaaaggtttgtatatcggatgttaatatcggtaaaaacgaggtttataattcgttgtatgcgggtattccttccaaaaaagtgtatgcccggttgttatagtcgattttgcagcaatagtggtttaagccattgctaacaatcaggtattcgacacgtagcaccatgttataacgggctatctggtcgaaaacagtgttggtaatgtttatatggggagctttgtactcgacaatgaccagaggttcaagaaaacggttgtaagcaaccgtatcgcaacgtttggaggttccattcagcttgaccagcacttcgtttgccagcagttctttcgggtagcttttccgagtgatcagataattgacaaaatgctgacgtacccattcttcaggagtgagagccacatatttttgccgtacgggatcgaagatcatacgttttccatctttttctgctactttaggcgcaaaaccaggtaagtttaatgcaagcatttactatatttgttcttttattctgtgaaaatagaccatcaaaggtagtgatttatgaaaacaaaacaagaaattgtcgagaattggttgccgcgctatacggagcggaagctggaagacttcgacaaatatatcctgcttaccaacttcacgaagtatgtggaactgtttgccgaccattttaacgtgccgatcctgggactgaaaaactccatgccgaacgcagcggccaatggcatcacaattatcaacttcgggatggggagcgcgaatgcggcgacaattatggatttgctatcggcgataaagccgactgccgtcctttttctggggaaatgcggaggattgaagaaggcgaacaacctgggagattatgtcatgccgattgcggctatccgaggagaaggcacttcgaacgaatatctgccggcagaagtgccgtcgctcccggctttctcgatgatgcgcgccatctcgtccgccatacgtgaccgggggaaagactactggaccgggactgtctacacgacgaaccgacgggtatgggaatatgacagcgatttcaaaaactaccttcgccgtacacacgctaccggtatcgatatggagacggcaaccttgtttacggcaggctttgcaaacgagattccgacaggagctttgttgatgatttccgacaaacctatggaagaagccggggtgaaaacggaagccagcgatcgcgaggtgacccggaattttgcgaaagagcatgtaatgttgggagtggaagcgcttcgccagattattgatggaaagaagacgatccgtcacatccgtttcagttggtaattttaattgagatcgcacacaaatatggcaaaaaaagaatatacatacgaggaaatatgtcggaatatcgttgcaaaaaaattcgctcctgtctatataatgatgggtgacgaaccgttttttatggatcagataacagacttgctactcgaaaatgtattggaagaatccgaacgggattttaaccaaattatcatgtatggagcagatacggatgcagcatctataattaacgcagcccgccgtttcccgatgatgtcaaaatatcagttagtggttgttcgggaggctcaattaattcgtgatattgagcttctgtcgaactatgttaagaaccctttaatgtcgacagttctggtcatcaattataaatataaaaacttagatcgtcgtaaggcgctggcttccgcaacagacaaaaccggggtgctgttcgagtccaaaaagattcccgactacaagatgccggcatttatcgcctcttttatgcagatgcgttccatagggatagacggaaaggcgtctcagatgctttctgacttccttggaaacgatttaagccgtctgagtaaggaattggataagctggcactgatcctgcctgaaaaaggtgcaaaacgcatcacgccggaactggtggagcaaaatatcggaatcagtaaagagtacaataactttgaactgataaaagcgcttgccatgaaagatgtcttgaaggcgaaccgtattgctcaatacttcgagaagaacccgaaaagcaatccgattcagatgacccttcctgtattatttaattatttctcgaacctcctgatttgttattatacgaaggatcgttccgaagccggcttgatgacggcactcggacttcgggggacattccaggttaaggattatcttttagggatgcgaaactattcggcgatgaaagtgttcaacctgatcagcgatatccgtatgacggatgctcgttcgaagggagtggaaaacacttctgtttccgatgccgaacttttaaaggaattgctctacaaaatcctgcattaaaacgatttttatacttgattggcctaaagaagaggctttttatctggaacaacagaaaaattgaaccggataaaaagcctcttcttattgtttctcaatcttttatcgttgattttaccctacttagattttaatatttgccttttcctgaatatctgttcacaaaaatcacaaaaatggagagggaaaaccttagctgcataaaagtatgttcgtccataaatcgtacaagtacaaattagagacactttgtcagtttatgaaatcaagtatttttagttcagtattaaattgtgaacggaatagtgcttgttagaaatgtaaacaaccctttttgtacaaaagatagctattgcatgattctactttgtaaacatataacaggagcgtaacatttgtttatgtttacattactatcataaaccgacaaaagtaacgatttcatctctactttatatttttagcataagtaatcatataccaaatgattatacaggattattaatttaatgcattaactattttgttacatatgcgtacaattatggctaaataggcgtgttatctcaatctcgttttctattaattaaaagattaacagtaaaatatagcctatctattaagtaatactttaatatgatttttacattaaaacaacctgttcacaatcttaacggaaacaattgtcatccatgtgatacaaaagtattagtttaagtttatataattaaattgcacaattgagaatcattgtgtatatttgtatcgttattgatttgtttacattccttccatgtaaacagacataatggcagtatttctataaacaaattcggatttacaaaaatgataggacgtattactcaaataatggagcgtgaaggcttgaccccttctaaatttgcagaagcaatcggtatccagcgttcagcaatgtcgcatattttgaacggaagaaataatgtaagcttggatgtccttataaaaattctggatcggttcacttatgtcgattccgactggctccttttcggtaaaggcgaaatggtgcgagatcatatgtcaacacaccccgatttgttctcaaatacggcgataaatccgtccggagggcaagctgctcttgaatatcgcaaggaaatgagggttgatacacctgtaaacactataaaacctcctgttgttgagcaaattatacagcaagaaacagcaaccagaaaagtaagtaaaataatggtattctattccgataatacatttgacacttttgtttccgaaaaaaataagaaagaatagcttgttttggtttatataccatattcatgtatctttgtatagaattagactaatcatattatatgaagaagtacatgcttgacatgaaggtgactgaaaactgtagccttcacaaaaattattgcctgcttaaactaacatctgatcagatcctgccggaaatgttgccgggacagttcgtacaggtacgtgtgaataactctcctacaacatttcttcgtcgtccgatctcaattaattatgtcgacagagcgaccaatgaactgtggttgctcgtccagttggtcggtgacggaacacgccggatggctgagtataaaccgggtgatgttgttaacatcatgttgcctttgggaaacggtttcacgctgcctgccgataaagaacaaaaattactgctgatcggtggtggtgtcgggacagccccgatgttgtatttgggatccatcctgaaaaaagccggttacacacctacgttccttttgggagcccgttcaaaggaagatgtgttacaattggaacagttcgaacagtttggaacagtctatgttacaacagaagacggctcattgggagaaaagggatatgtgaccaaccattccatcttgaaagatgtacatttcgaccggatttacacttgtggacctaaaccgatgatggtggctgttgccaaatatgcccatgcaaactctattatatgcgaagtctctcttgaaaatacaatggcttgtggtataggagcttgcttatgttgtgtggagaagaccaaagatgagcatcatgtgtgtgtatgtactgaaggacctgtatttaatattgaaaatttgacatggctgaattaaacgtaaacattggtaatttgcaattgaagaacccggtcatgacggcgtcgggtactttcggatatggcattgagtattcggactttatggatatctcccgcttgggtggtatttttgtgaaaggaacaacgatccagccacgcgaagggaatttgtatccccgtatggcggaaaccccttcgggaatgttgaatgccgtaggtttgcagaataagggtgcacaatatttcgtcgatcatatctatccggagattaagaatatcgacacgaacatgattgtaaacgtgagcggttcctctgtggaaacgtatgtggaatgtgctgagaagattgcagatttggacaatattccggcgatcgaactaaatatttcttgtccgaatgtaaagcagggaggtatggcttttggagtgacgacttgtggggcaagtgaagtggtgaaggctgtccgcaaggtttatccgaagacccttattgtaaaactttcccctaatgtgaccgacattacggagattgccaaagcggtcgaagccgaaggagcagattccgtttcattgattaatactatgctggggatggccattgacgcggagaagcgtaaaccggtattatctacaataaccggtggtctttccggtccctgtgtaaagccggttgccttgcggatggtatggcagacttataaggctgtaaagattcctattatcggtttgggaggtatttcgaactggaaagatgcggtggagttcatgctggccggagctacagcaatccagatcggaacctacaattttgtagatccagctgttggtataaaggttatcgaagggatgaacgactattgtgacagacatggtttttcgtctgtccgcgaactgatcggagctttggaagtataaaaacaggatgagataatccttttcggaataaaaattaaagaaaagcctgtaaaacgacttattttatgcgttttacaggctttttcttgtaatttttattcgtttggactatcattattccaataattataatatctttgttcgtatataaaataaaccttgaatttgtaatatctaaattaataaattatagaagaaaaacatgaagatcagacatctttttttgctatgtctaatagcgatatcagcgacgctgagtgcaaatggaaaaactgtaattccaattacaaccgatgacattagccttatttataaggttgatgataaaaatggccgcctgtatcaatcttatctgggacaaaaactgtcattcgattcggatatcgtacaattacctctcggtaatgaagcctatctgacacatggcatggaagattatttcgagccggctatccgtgttttgcataatgacggtaacccgtcactgctcctgaaatatatctcccacgaaaacaaacagcttcagccgggagttgacgagacggtaattcttttgaaagatgataaatatccggtcgaagtgaagttgcatttcatcgcttatccgaaggaaaacatcatcaaggaatatgcggagatctcgcatcaggagaagaagcctgtcaccctttataactatgcttcctctttgttgcatctgaacggcagcaagtattttctgaccgaatttgcaggagactgggcacatgaagtcaatatgaaggaaaccgagctggctttcggtaaaaagatgttggataccaagttggggagtcgtgccaacatgttttgttctccgttttttttgcttgctctggacaggaaagcggaagagaatgccggagatgtattattcggaactatcggatggacaggaaattaccgttttacgtttgaagtggataatgaaaatggcttgcgcgtactttccggtatcaacccgtatgcatcggagtactcgttgaaaccgaatgaagtgttccgcacaccggagttcattttcacttacagcacggaaggtaaggggaaagccagccgcgatttccagcgttgggcacgcaaatatcagttgaaggacggtgagaaatcccgtatgacattgctgaacaactgggaagcgacctattttgactttaatgaagacaagttggtcaatattatggatgaagctgttgcattaggagttgatatgttcttgcttgacgatggctggtttgccaataagtatccccgcagcagtgaccatcagggattgggagactgggaagaaaccgttaccaagctgcctaacggtatcggaaagttggtgaaggaagcgacggacagaggtatcaaattcggcttgtggatcgaaccggaaatggtaaatccgaaaagcgagttgtatgagaaacataaggactgggtgattcatttgccgaatcgtgacgagtattactttagaaatcagatggttttggatttgactaatccgaaagttcaggattatgtatatggtgtggtagacaatctgatgacgaaatatccgggtatcgcctatttcaagtgggattgcaacagccctataacgaatatctactctccgtatctgaaagatcagcagtcccatttatacattgagtatgtacgcggtctttataatgtgctggaacggatcaaacagaaatatccgaatctaccgatgatgctgtgttccggtggtggtggacgttgtgactatgaagcgttgaaatatttcaccgagttttggccgagcgataatacggatgccgtagagcgtatttttatccaatggggttattctcacttctttcccgctaaaagtatggctgcccacgtaacgagttggggtaaacagccgattaagttccgcacagacgtagctagtatgtgtaagttaggtttcgacatccgtattcacgaaatgagccagacagaccagcaatactgtaaagaggcggtggctaacttcaaacgtttggatgatgttattttggacggtgaccaataccgtttgcagtcgccttatgaaagccagcatgctgctgttatgtatgccaacgacaatgcagacaaagctgttctgtttgccttcgatatccatccgagatacgcagagtcgatacaaccccttcgtttacagggcttgaaggaggatgcccgttacgaattgaaagaaatcaatttggttccgggtacgcaatccagattggcctgcaacggtaaaacgttctccggagagtttctgatgaatgtcggtattcctgtgttttcaagtcggccgacaaatagtcatgtgattgaaattacagaggtcaagtaatcaaacaaattgctatatttgtgtgttactaaagcaataagtatgttagaacagataaacgacatattacaaaacacggttattaccccttatacggcaactgtaaagttgttgatcagttttctcttgggagctgtcatcgggatagagcgccagttcagaagacgggaggcgggaatgcgtacctttacattgatttgtatgggttcgactgccgctatgctggtctctatctggattccgcaatgttatcctaacttcttgaatggcgatccgggacgtattgcggcacaagtgctttcgggtatcggttttcttggagcgggagcaattatccaaagtcacggaagtgttcatgggctgacgacagcagcctgtatctgggtaatggcggtaataggtttggcagtgggagccggaatgtatattccggctgctattgcaactgtcataacacttttcattctggtcagtctggaacgtttggagaaaagaatgttcttgaatggtgtcaataagatcctggctatcacctgttctacagcgacccccgatttgaaggctgtccggaagatattggaaagtaaaggcgtttttatcgtaagtgtctctttcgagacgttttataaagaggatcgatctgttatcacatacaaagtgaatgtaaaggcgatctcttcctatacgaacttattcaatgaaatacggagtttaggtattgttacacaaatcagattgatggcataagccatcaatccaattctcctttcagcattcttcctgcaatgcgagccgaatctccaacgaatcttccgcaggggcgcttcttataatattcttgcgtacgggcggccggtgccggtgtcgtagctgctgcgtcttcaggaggcaaaaggttgcggcagatgattgtcccgtttttttccttgaacatgtcagccattttctgtaccattgcataattcctggtgcgggcttcctgatcggaaatgtcctgaaccggatatttgaatcccgctaacatagccattgcgctgactgttccgcaaatttcgcgcatacgacctacacctcctccaaaagagacagacattttcttggctgtctccatatccaattcaaagatatccgagtaagccagaaagacagattgtgcacaattataacctgcttcgaaattctgaactgcacggtttactcgttcttcaagatcaaagtctttcatgatactcttcgcttgttaatattcatagtcgacgcaagctctgtctgccttgacgggaccgatgatgcctttggatacggctacatgttcgggatggttggcatacgttccgacatcctcaagtgtatccagctccgtagtaaggatgatatcccatgtctctgccggattcacgttaaaatctacgcggatcatgcgcaagacgttgattttgtcgattaatgcttctaatcctgttttgatttcctgcattttagcctgcttgtcggccggagttgcaaactccttcaatttaaacattacgatgtgtctgatcattttactatttatgattatttatctatataataaatcaatgtcacattttttcatccagataggaatctttatagcccaagaaatacaggataccgtcaagcccgatcgttgaaatggactgtttggccgtagcctttacttttggtttggcatggaaagcgattccaagaccggcaatactgatcatcggcaagtcgttggctccgtctccgacagcgaccgtctggcggatatccacattctcgacttgtgcaataagacggagcagttccgctttgcgtttcccgtccacgatgtcgccgacatgacatccggtcagctttccattttccacttcaagctcgttggcgtagacgtagtcaatgttgtatttctgtttcagatagttgccaaaataagtaaatcctccggaaaggatcgcaatcttgaagcctacctttttcaatatacgcatcagacggtccaccccttcggtaatcggcaggttctcggctatttcctgcataacggagacatccaagcctttcaacaaggcacaacgttgacggaaactttcgcagaagtcgatttctccccgcatagccgcttcggtaatggctttcacttgatcaccgacaccggctcggatagccagttcgtcgattacttccgtttcaatcaatgtcgaatccatatcgaagcagatcaggcgacgcatgcgtcgatacatgctttcttcctgaaaagatatatccatctcctgctcggcagagagtttcatgaaatcggccttcatctgttccttgtccctcggcgtaccgcgcacggagaattctacactggctttcggcgtccgggcattctcatccaaagggatacgtcccgtcaaacgcttgatgtcgtcgatgttcatgtcctggtcggcaacaatgcgtgtaacacctgcgatttgtcgggcagtcagtttccggcccagaatcgttattatataccggttcttgccttgcatggaaacccattggttataagcttcctcggtgatcgggttgaaacggatatttacatcaagctcataacttttgaagagtaattctttcagaatatcccccgaattgccttcgctactttgaaataagatgcctaaagagaggttgttgtggatatcagcttgaccgatgtccaggataaccgcgttgttcttggccagtatctcggtaagggcggcggtcacccccggacgatccgtaccatttatgtttatcagtattatttcgtctttctgtcccatacgattgtaattgtgaggcgaaggaacgaataattattttaagtaaaaagtgttttcttaaaataataccgttttatcagagatatggaacaatcgtccctcatgccttcggtgcgcttgtcctgatcctgcacgaataggcagatcaagggataaaagttgtaaaaaatcaggcagaaatgacgagggtgtatcccgttaatacaacaggggcactctcgtcatttctgttttgtttttattttcttatcgcttcgacctcttcagcacggacggggatctttttacctaacaggcgggcgccgttttcggtgatcaaatagtcctcttcgttgcggataccgctgaaatctttatatgtgaacagcttgtcgtaattgataaattcggtgaacttgttctggcttctccagagatccatcagttcggggatgaagtaaacgcccggctcgatggtcaggacaaagcccggttccaacttacgtccgaggcggagagacttgcgtccgaactccgtgctcttcggctggccgtcatatccgacgtagacttcgcctaagttttccatatcgtgaacgtccagtcccatcatgtgtcccaggccgcaaggcatgaacatggcatgagcaccggctttgaccgcttccatcggatcgcctttcacgaagcccaactctttcaggccttccatgatcactttgcaggacaattcatatacatcgacaaacgggatacccggacgcaaagctgcaacagctgcttcgtgggcagccacctggatatcatagatctcacgttggcgagtggtgaatttggcatcggcaggaatcgttgacgacatgtcgccggcatatcccatctccgtttcggcgccggcatcgagcagcagcatgtcgccactcttgatcaaattgctatgatcatggttgtgcaacgtctgcccgttgatcgtcgcgatgatcgggaaagagagttcgtaattgttggcataagcaacttcggcaacggcggcggccacttcgctttcgcggatgcccggacggacggtgcgcatggcggccagatgcatgtcggctgtcacgatacaagccttttctatttcggcaatttcttcttcgctcttatagttacgctggttgacaacgcccataataaaaggtacggaaggtttttcggctcccggaacgacgcctaaccactggaacagcttgatctggtgttcggcgcggtaagtcggcaggtaatgaatcggctggcctttctgctgcgcattcttcagataggtttcgatttccttgaacggacgtacttcggtgataccggctgcttcgctcttttccttcagcgtcggctgtgttcccatccagacgattgcgtcgatcgtcagttcgtcgccgaaaatgatctcgcggttgttgtctatgtcgatgatggcggacagcccggcgtagggaagcccgaagaaatacagaaaagtggaatcctggcggaaatggtatgtgttatcggcatagttcatgcctgactcatcgttacccaaaaataacagcaggccggaacctatcgtctgttttaatttagccctgcgggcgatataagtttcttttgcgaacatgatattataaatttaatttaatgcaaccaaaggtaagcataaattggaatcctaacctattcgtatcctattatttttgtcgttactcgtatctttttgtcagcctttggaaagtttcaccgatttccgcctgccggcttgcggcgggaacgaattatcgtacctttgctatgtaatcattaaaatacaagaactatgatgaaagacacatcttattctaaaattccttctaattacggtttatgtgcggcagactgtcctcgcggcgacacttgtctcaggcggatcgcatacgaccgtattccggcaaatgttgtttttcctccgacattgcatctgaaagcgatagaagcgatggcggggaagtgcaagtattaccgttccaacgagaaagtgcgctatgccaaagggttcctgtgcacggccggagccttggcggtcagtgtgtcgggtacgttcaggtgtcgcctgatcggtagttggggagccaggagatattatcagaagcggaaaggagaaacgttgctgtcaccagccgagcagcagcaggtggttgcgcttgccaggaagttaggcgtgcggttggacgaatactttgacggatatgtggaggaatacgactggtgaccgggcatctgccgtcttttacatgcccaggtaaaagacgttacatgccgacgtaaatgcttttacctgccgatgtaaatccttttacatgggaacgtaaatgcttttacatcggcatgtaaatgacatgtaaatgcaatgcgctgacagttaactgataatctttttaccgctttatttgatcggatgaatcggcgccccgtccatataggtgagggcggcgcctatggctgtcctgtattccgaatatttggggatcaggaaacggacgccatacatctcttccagcttggggaagatctccttgcactggggcagttgcgtcaggttgccgatcaggacgaaatcgcggatcgggctgttgagagccgacaggatggcagcctggccgatcgattgtaagaccatgtggataatcccggaagcaatgtcttcgggagaggcgttgccgtccgcctttccgaagttggaggcggtggcgtccagcggcaggtcgggcaggggcctgttgcagatgtcctgtatctggaggtcgatattcgtcagggtccctttccgggccatttcagcgatcagatgaatgtcctgcgttttcaggagcaggcgggagagtccgagcaaggttccgcctccgatgccgatcccgccgatatgttggatatgcggtccttcaacctttacgaaagaagttcccgtccccatacttacgacaatcaggttttccagcgaagcggcatatttggctccgaggccgttggccaggaattcatcggtcttggctgtcggcaagccgtatagcggctgatcgatgaaagcgcttccgacacccgtcagcatcaccatctcgatctccggcaaggtgatcccgttgtcatagatatacttgccgaaagctccgaagagcgaggtgaccggatcggtcgccttgacgaacatcggcgactggatgctcttgttttccactccgataatcttggttgtgcttccacctacgtcaatacctattactacgcccatattttcatgatttagttataactttccgtatcttttcgcttgcaaagttataactatttcttacattgtcccggcaaatataacctttatataataatgaagatacggcagataatggcacttaccggcgcgacagtcgtgtgtggtaacggccgggaagaccatgaagtgcagtgcgccttcgccagcgacctgatgagcgatgtcctgacattggattgcaacggcgtgctcctcgtcacgggtctgtgcaacatgcagacgatccggacggcagagatggcggatgtttcctgcatcctgttcgtcaggggaaagaaagcgacgcccgatattttgcaactggcggcggaaaacgagatgatcctgatggaaacggaccactcgatgtaccatacggtcggcgaactttattgtaacggccttccgccgatctattaaacaaaaggaggtgaagatatgcaattcagatttgaactggaaggaggcaacttctcaaaagccggctatgcttcgagccagataaagaaggtgttgaagcaactgtccgtcgatccgcgcatcatcaagcgggtggtcgtcgctctttatgaagccgaggtcaacgttgtggcgcacgcctggcgggggacggttctggccgatatcgaagccgacaggatcagcctcctgttgcaagacgaaggtcccggcattcccgatatcggacaggccatgcaggaaggtttctccaccgcatcggcagccgtccgcgagatggggttcggtgcaggcatggggttgcccaatatgaagaagaatgtagatgaattaacgatcgagagcaaagtcggagagggcacggttgtccgtatgctgacctatttctccgcaaacgacagatagccatggaagagacaaagttttaccacgcattgaaaatagacaatgaccgttgtgtcggctgtacccactgcatgacgaagtgcccgaccggtgcgatccgtatccgcgaggggaaagcctccatccgtaaaggttggtgtgtggactgcggcgaatgtctgaaagcctgcccgacggaagccatctatgtggagcaggacgacttccagaagatattcgactacaaggcccgtgtcgtgctggttccgacggtctttatcgggcagttctccaaatatacgacggaggaagagattttcagtgcgctgtacgaactggggtttacgcatgtgttccaggtcgagtttacggcagacatgatccatcgcgagatgctcaggcagatggagctggcggaggataaacctgtcatcagttcgttttgcccggctatcgtccggctgatacaggtgcgcttcccggccctggtcgataatatcttgttggtgaagccgccggtcaatgcgacagccacttactatcataaggtattggaagaagacggtttctcgtccgaagaaatcggtattttttatgtgacgccctgtgcggcgaagatcgcctccctgaaaggtgcggagggatattcgtccacgatcaaaggcgtgatcaatatggataccctatataataaggtatatcatatcctgaaaaaccgtccgaagaactacacgcccgaatgcgtccttccgccctccctgaccaaaaaggagatgcgttggagccagacgggaggcgaagccaagcatttctccggccgctgcctggcgatcgacgagatacacaatgtcatcgaattcctggaacggatggaatcgaccaccgaagtacgcaatgtggacttcctcgaactgcgtgcctgcgaccggagttgtgccggtggcgtgttggcagtcgccaaccgtttcctgacagccgagcgggtgatgaagcgttcggtgaaacgcgacaaagctccgctgatctattccgaccggttggaggcgttgtcctatctgaaacaacacatcaccattcgtccgcttcaacccaacccgaagttgcgatacgaaggaaatatcgaagaagtcctgaaaaagatggagcaggtgcgcaagttgatgtgctacctgcccggcatcgattgcggggcctgtggttcgcccaactgccaggcgttggcggaagacatcgttcgccatgaggcgcagttcagcgattgtgtcttcatgcagcgtaatatggagaagcacgggaagctggacaaggaacatgctttccgcctgatcgaaaagacctggggaaaagaccggttgaataaagattgttataagaaaggagccaaatatgaaggtcagtgatttagtgagagaattgaacttaaccgttttttgcggagaggcaggactggacgcggagatttccggcggttacaccagtgacctgttgagtgacgtaatggggcatatcgacgaaggaatgttgtgggtcacgatgcagacgcaccagaacatcgtggccgtcgccaccctgaaagatgcggctgccgtcctgatcgtgaacggggcttcgccggacgaggagacgcttgagaaaggaaaagaggaagacgtgcctttgctcggaacgccgctttccgcattcgaagtaacgggaaaaatatacagcctcttgctacaggaatgaaagagttccgggtagatttgcacctgcacacctgtctttcgccttgcggaagcctggagatgagcccacagcggattgtggaaacggccctcgaacggggattggatgccattgctgtgacggatcataacagcacgctgcaatgtcccgaaatcctggctttaggggaggagcggggactcatggtctttgccggtgcggaggtgacgacacgcgaagaggcgcactgcgtggcactttttgcagatgaccgggcacgtgccgctttccagatgtatctggatgacaatctgccgcctgtcccgaacgaccctgaacgattcggcgaccaggtctgggtgaacgcccggaacgagatcgtgggggaagccccttatctgcttatctcggccctcgaccggagtgtggaacagattgccgcagtggtgcatcgtctgggcgggttgttcattgcggcccatgtcgaacgtccttcgttcagcctgatcagccagttggggtttatagatccttcgttgccgctggatgcgatcgagttcaaggatgctgtccgctatgaaaggctgttggcggcacatgcttatttgaagcattacacggtctatagcgcttctgatgcgcatgatcccggacagatcggcacgaaatattccctgctaagagccgacctgcttgattttgaacatttagcaatggctttccggaaggaaaacggtcatacgattgtaacagcatgaataatctatcttttcatatcaccgatatcaccgcaaacagtatccgggcgaatgcttcggagatagggctgtccgtagaagagcaggatacccgcatcgtcatccgcatcacggacaacggcttagggatggatgcggaaaccgcccggcgtgtcacgaacccgttctacaccacccgcacgactcgcaaagtcggactcggccttcccttcctgatccagaatgcggagcagaccggcggcagtgtcaccctgacatccgagccgggaaagggaacgaaagtgagggctgtctttcattcggatcatatcgattgcccgccctggggagatcttccgggtacagtcgccttgttgatcaccggcaatccggaaataaacgtttgctttgaataccgttcgggagaaaccgggtattcaatcagcacgaatgaaataaaagagattctggacggcgtctcactgagccatccgaaggtgatgttgcttattaaggagatgataaaagaaaatatccggtcttgaaaataagatggtctgattggttataagcaatacgcacctctttatttctttcctgttttatgaagataatagttgtaacgctccatcacctcgcgcacataattgaaggtttccgaaccacgcaggtagccgtgtttgcagaccggatcattgtagtactccggatcgttcttcatccggatatattcggccacattatcatcccagacatatgggtctttgccgtatttctctgccagtcgttgggcatcatagatatgcccgatcccggcattgtaagccgctaaggtgaacttgatcttttcgaccggatccgttatttttccaaatccctgacggaaacggcgcaggcaatccacacccgtacggattcccgtgtccggatttttcagttcgtgaggcgttacccctaaagcctttgccgtgttcggcatgattcccatcagcccttctgcgccggcccatgagacgacgttcggattgaaacgggattcctggtagccgatagaagcaagtagctgccagtcccagccgatgtttttggcgtgtttgcggaacaactcgtcgtagggcgatacatgtccgtttttgacttccggtagttcggtcgtgacgggttgtttgctcagttcgaaatagcgtttcgtcaaagccttgtagacatgcgttcccgccttgtcggatgcccacgcgtcgatggccttagccagttcggggctgcttttgcgtacgacccatgaggagcgttgcataaaactgatcttcagcgaaacgttcaggttccagaaataagttttgttcaggcgggctatattctcgtcgcttatggtgtaagggatttctccttgcgaaaccatgccgatcagatcctccgttgtcactgtgtcggcatccgcttcatgaatccggataccgcctcctaattcgacatcgaggttcttcaaccgttcgaaatatttggttcccggctttacatagacatcttttccgagcagctccgtcacgtcggtgatcaccttgtcgcctttgttggcacgttggatcagcacctggcaatcttgctcttcccgtccgcaatagatgagtttctctttcatgcggttgctgatctgaatcgggtaggcgacgacatcggcttctcccgcttccaacatttcgatcagtttggcaggactttcggcaactttaatattcagtttcagaccttccgaacgggcgaaatccttgatcagttcgtattcgtaacccatcggctgcatcttatactgaaaataggaagtcgagctatatagcgtgacggccgttatttcgccttgcgctttcagttgaggcaggtcaattgttacatcgtcatcctcctgtccttgttcctgcctcgcacgattacaaccggacaacaacaaagcaaatgaaaacaggaggatgatcttgttcattattttctaagcttttaattcttaacttttaatttctccaggaggacgacattttccacatgatgcgtatgtgggaacatatctaccggctgtaccttcttaacggcatacttcaccgagagcaggctcaggtcgcgtgcctgtgtcgcggggttacagctcacgtaaacgatacgttccggttccgcaaaaagaatcgtgttgatcacatcgtcatgcataccggcacgaggcgggtctgtgataataacatccggacggccatgttggttgatgaaatcctgtgtcaggatatccttcatgtcgccggcgtagaacagtgtattctcgatcttattcagcgaggagtttactttggcatcttcgatcgcttcgggcacatattcgataccgatcactttctttgcctggcgggagacgaaattggcgatcgtaccggttccggtgtacaagtcataaaccatttcgtttccggtcagtccggcaaactcgcgggcaactttatagagttcgtaagcctgttcactgttagtctggtagaacgatttcggccctactttgaactgaagtccttccatctcctcgatgatatggtcttttccacggaacacaagaacgtcctggtcggtaatcgtatcattgcatttttcgttgatgacgtacatcagtgaagtgatctccgggaactgttcagccacataggagagaagcgcttcgcggcgttccacatcttcatagaaaaataccagcactaccatcagatcgcctgttgaagccgtacggatcattaatgtacgcacaaatccttcctgattgcgaaggtcaaagaacggatagccttcgtgtgtcaggcagtattctttgaccgccagacggatgcggtttgaaatatcgttctgtagccaacatgtatggatatcgagcaccttgtcgaacattcccggaatatgaaagcctacagcatccatgcaatcaaacttggctccggttttcacttcctcttccgtcagccatttcttgttggagaatgtaaattcaagtttgttacgatagaaagtcgtatgtttggaacccttgatcgggagtatttcttccatttcgatcttaccgatccgggtcaggttgtcgatcacctgcttgtgtttgtagcgaatctgttcctcatagggcagatgttgccatttacagccgccgcatacgccgaaatgttcacagaacggctctgcacgtcggggcgaatattcatggaaaaatacagcttttccctccgcataactatgtttcttacgtgttaattgtatgtctatgacatctccgggtacaacaaaaggtacgaatacgaccatgtcatttacgcgtgcgatagcctttccttctgcggctacatctgttattgttaccttttccaataaaggcaactgcttcttatttcttgccaagatgattattttttaatttatggcgcaaagatagagataaaaatatatcgtaaaatacttctgtgtaaaagattttgactatccgcatggttgtccggccttttcccggctgtcgaaaatacctgtcatatgctccaatgcccaaccgacaagactctcgatatgtggtatcagcgttttgccggtttccgtaagttggtattcgacacggggcggaacttcagcatagactgttcttgaaacaagtccgtcggcttccagtgtgcgaagcgtgacggtcagcatacgttgtgagatgtcggaaattgttttttgaatgtcactaaaacgaagagatcagaagacttcttccggagcttcacgtcttgcccgataagagtatatgagaaagattcaaaagtcataacgagttgatacaatatatgtatcaactcgttatgactttgatcagctaattacgacctcttatttatgtcggggtaccaggattcgaacctgggaccccctgctcccaaagcaggtgcgctaaccggactgcgctacaccccgttttgcaatttcttttatttttgattgcgatgcaaaggtaggtatttttttttaactaccaaatatttcattgtttttttttatttacgtacattcgcatcagtttaggagatcattacaacatgtataccccctttatcaacttttagaatgaacatattgcaaaccaatctgttatatatcaaatgataaaacaaaatttaaataataaaaaatatgacaattgcttatatacgtacatattcaaataaacaacaaacagagagccagaaaaacgcaatcgaacaatttgcaaaagcaaaaaaaattgagattgacaaatggttgaaagatgctaaaaattcttccaaagagaaaaaccgactcgaagacgtaataaaaaatttacaagaaggcgatattcttatcgtcgccgatgtcactcgactcagcaggaaactaatggagataatgcatttgattttgttgtgtattgaaaagaaagtggcactttactgtatcaaggaaggttattcatttgaagataacgtgaacagcaagacgttggtatttacatttgggcttgtttctgagattgaaagcaaacttatttctgcccgtacgaaagaagcattgacagccagtaaaaacaaaggaacaaaattaggacgtcctttgggaagccccaaaaccgaatttctcctttcccagaaaagccagatcgaaagagaattgaaagaagaaaatgcaacatatgccgaattagccgattattataaggtttctttaagcggtttcaagcgcttcattcgggaaaatataccgaacttaccttcaagaaggaaaaagaaaaacgataccgaataaatataaaaagcgggattttcagatatacttaaagataattacgattatgtttaataggattgttgaatttcttttttgcgcagacataataaaaaccccgaaagttttttgtctaactttcggggttcattatatgacatattttcttttatcaaatatccgatctattatttattcatttctgcttcaatagcttctaattccggccccatgttcagattgtaatagatacctctcaaagcgatcatgttgtccattttttcaggttcagcttcatgagcttttttataataaggaagagcttttttgaacaaatcttttgccatgcttaattcctcctggtatttcttactatcattaatcatattggcttcgcttaatttgttcactccttgattgtaatagatacgaccaatgttagaaagcgcatctgtcaaattcggatctttttctaaagcaatctggaaattcttttcagcattggcataatcttttaatccggtttcataaacacgtcccattacattgtaaaggtttgcatcatttggatttttctggattgcaacattcaacatttccaatgctttttcatttctattggaatagatgtatgtattgatcaagttattcaagaagaatgccgaatctggaaaaacctgcatgccttcttcgaatgttttttccaacataacagaatcctgagcagttcttgcctctccgtattcgtagcaaagatactgataaacatcatattgacgataaggagtatttttagcacgttccaaagcggcaatagccaatctggaatctttagctaaagaagctgctgctgctgcatagaactgaactgtcatgaatgtagagtctttttccgcagtctgagtccctgcgaacattggcagttcggatatttctacatattggttgaagaaatcgtatgcttttttatactcttgtttatcgaaataatatgcaccaccattgaacagatatacatggtttgcgctcaagatacttttgatatcttttgtgtatttaggtttcactttacctttttcattaggcaactgatccagttcgtaggctttctggaaataaggtaaaataccatacaaagcttcgtacataaccggctcattgggttgctgtcccagaatttgtttagctctttcagcattgaactgctgatcttcgataaaacctgctacataccaagttttagcatcgtctttagtttccggattttccaacgctcctttgatcaaggttctggcttctccgaaatctgcgttacttcctttcgcaatactctgtgcctcgttcacaacttttttctgtgcgaaagaggcagatgctgcaacacatagtgcaactgtcaataatactcgtttcatttgtgatagtgatttgagattaatatttctatttgtttaaattattcctcagttgttccttctgtatcgtccgcattttcattgctttcgacatcatcagaaacatcttcgaaatcggtattctctattggatgttcatgaattgccgcatcttctaaagcttcacgctgtgctttttcttcagcgatctcttcttcggtctgtgacagcactttgcatacagaggcgatttcgtcattacgttttcctaaattaatcaggcgtaccccttgtgttgcacgtccgatgacattcagatcggataccttcatacggattgtgataccggatttattaatgatcataatatcgttttcctccgtaacattcttgatggcaaccagtttaccggtcttttccgtaatgttgatggttttgacacccttacctccgcgattcgtaatacgataatcttcgatattagaacgtttgccgtaaccttgttcggacacaaccagtacagtttctttttctttgtccttaatgcaaaccattcctacaacttcgtcgttagaatcgtcatcaagtgtcatacctcttacaccagatgctgtacggcccataacgcgcactgcattttcatggaaacggatagcacgtccgttacggtttgcaatcagaacttcattattgccatttgtcatacaaacttcgatcagaccgtcgtcttcacgtaatgtgatggcatttacaccattctgacgaggacgagaatatgcttccagtaacgtcttcttgatcacacctttctttgtacagaacaacagatagtgcgaattaataaactcggtgtctgtcgtcagcttctttacgcgaatgaaagcgttgaccttgtcatccggttcgatgttcaacaagttctggatcgctctaccctttgagttcttcgctccttccggaatttcgaacactttcaaccaataacattttccttttgccgtaaagatcagcaaggtagcatgcatggaagccggatagatatattctacaaaatcttcgtcacgcgtttcagaacctttggcccctactccgccgcgtccctgagcacggaattcactaagcggcgtacgcttgatgtatcccatgtgggagatggtaatgatcatctcatcatctgcatagaagtcttcaggattgagttcttcggaggcataaacgatatctgttttacgttcatctccgtacttgtccttgatttcctgcaactcgtctttgatgactttcatacaaagatcgtcattttctagaatttccttcaaatatgcgattaatttttcgatttcttcatactctgcacgaagtttatcctgttccaggccagttaactggcgaagtctcatttctacaatggcacgagactgtatatccgacagggagaaacgttccatcaaacgttcgatagcttcagcagggcttttagatgatttgatgattgcaatgacttcatcaatattatcggaagcaataatcagaccttctaagatatgggcacgttcttcggctttcttcaaatcgtatttcgtacggcgaatcacgacttcatgtctatggtcgacaaacgctttgatcaaatctttcagattgagcagtttgggacgcccattcaccagcgcgatattattgacgctgaaggaagactgcaatgccgtcatcttatatagcttgttgagcacaacactcgaatttgcatccctttttacatccacgacgattctcatgccttggcggtccgactcgtcatttacattcgatatgccgtctatgcgcttttcattcactaaatcggcaatatacttgatcagttcggctttatttacaccataagggatttccgaaatgataatcttctcatgattattttccgtctcgatttctgctttaccgcgcaaaacaatacgtcccttacctgtttcaaaggcgtcttttacaccagcatatccgtagatagtcgcacctgtcgggaaatcaggagctttgatatattgcatcaaatcagctacttccatttccccacgagtatcaatgtaggccatacagccgtccagcacctcgctaaggttgtgtgttggcatatttgtcgccataccaacggcgataccagatgctccatttaccagcaaattcggaatacgagtcggcaatacggtcggctctttcagtgtatcatcgaaattcagctgaaaatcaaccgtatctttgtcgatatcgcgaagcatttcttcggcaagtttacttaatcttgcttctgtataacgcatggcagcaggactgtcaccgtccaccgagccaaagtttccttgtccatccaccaacgtatagcgcatagaccatgtctgtgccatacgaaccattgcgaaataaacagacgagtcaccgtgtggatggtatttacctaaaacttcaccaacaattctcgcagattttttataaggtttgtcggatgtattacccaattcattcattccaaacaaaatacgacgatgaaccggtttaaaaccatccctaacatccggaagggcacgtgaaacaatgacagacattgaatagtcaatgtatgccgatttcatttcctcctcgatgttaatcttaataattctgtcttgatcaaccatttagtcttatattaattacactcaatatctcacctttcaaaaagtgcactaaggtaaggcttttccgtgtatcacgaaagcttttgactcgaaattttagaatttacttgtcagaaggcatccggtttcaaaccatcaaaatgaaactgccaccctatgaaaatgggattagtagtacatgtatttggaattacatttacgggtaatatttttttacgtttctttataacaagataaagctgttttttgtaatatatgacaagcctggcttcaatactttattttcttttaaggaataatggcatggattttgttagatatatgacgagagtttattacatttgcactatcatagtacattattataatatgaaaaataactattcaaagagattaatggacgttattgaatatagccgtgaagaagcagcaaggcttcagaacagttatattggaccggaacacttaatgcttggaattatccgcgacggcgaagggaaagccgtgcaggccctgcgcgaactaaatgtcgacgaatgggatatcaaaagaaagatcgaacaggaaattaaaaatacaatcgatgccgaagatgctgtccagcatgatatcgctattagtaaaacaaccgagcgcgtactgcgtatgagtatgcttgaatcgcgcttgttcaagaaaaaagaaaccggaacggaacatttgcttctagccattttgaaagaagagtttaatgttgcggcaaaggtgctgaacgaagcgggcataacgtatcgcagtatatataattacctgataagcggcacaggtttgaagcacatggatgattttattggagaagaagatgccgaacattttgaaggaatcagtgatggttacaccgatgatgatgaagacgatgacgatgattactcttcccgccgggagtctccccgctcctcttccggaaccggctctgcacaacccaaatcaccgaacgacacgcctgtactggataacttcggtacggatatgacgcgtgcggccgctgaaaaccgtctcgatccgattgtcggacgtgagaaggagatcgaacgtttagctcagatattgagccgccgcaagaagaataatcctgtcttgatcggtgagccaggtgtcggcaaatcggcaattgtggaaggtttggcactgcgtatcatccagcgcaaagtttcccgcgttttgttcgacaaacgtgtgatcagcttggatatggcatctatcgtggctggaaccaaatatcgcggtcagtttgaagaacgcattaaagctattttaaacgaactgtcgaagaacccgaatatcattctgttcatcgatgagatccatacgatcgtcggtgcaggttccgcttcaggttcaatggatgccgccaatatgctgaagccggctctggcccgtggtgagatacaatgtatcggtgctacgacattagatgaatatcgtaaaaatatcgagaaagatggagctttggaacgtcgtttccaaaaagtgatcgtcgatccgacaacagcggaagaaactttgcagatcctgcaaaatatcaaggcccgctacgaagaacatcacaatgtgatctatacgcccgaagccctgcaagcttgtgtaaaactgacagaacgttatatcagtgaccgcaacttcccggacaaagcaattgatgcgttggatgaagccggttctcgcgtacatatatctaacataacggttccgaaaagcattgaagaactggaagccaagatcgaggcaaccaaaacagagaagcttgctgccgttaagtcacaaaactttgaattggctgccagcttccgtgacaaggaacgtcagtacctcttacagttggaagcagccaaagccaaatgggagcaagaattgcaggagcatcgcgaaacggtggatgaagataaggtggctgaagttgtagccatgatgtcaggtgtccctgtccagcgtatcgcaaaagctgaaaacctgaaattactcgaaatggcggagaacctaaagaagaaagtagtcggccaggatgatgccgttcagaagatcgtaaaagcaattcagcgcaaccgcgttggcttaaaggatccgaacaagccgatcggaacattcatgttcttagggccgacaggtgtcggtaagactcatctggccaaaaagttggcggaatatctgtttgactcggccgacgctttggtccgtatcgatatgagcgagtatctcgaaaagtttgcggtgtcccgcctgatcggtgcgcctccgggatatgtaggttatgaagagggcggtcagttgaccgagaaggtccgccgtaagccctactctgttgtcttgttggatgagatcgagaaagcgcatccggacgtgttcaacctgctgctgcaagtcctggacgaaggtcgtctgactgacagtcttggcagacggatcgactttaagaatacaattctgatcatgacgtctaatatcggtacacgccagttgaaagacttcggccgtggtgtcggtttcagttcgcaggctgctggcgagccagataaggacttctcccgcagcgttatccagaaagcactgaacaaggcatttgctccggagtttttgaaccgtgtggacgacatcattatgttcgatcaattggataaggaagcgatccataagatcattgatatcgaattgcaaggtctttacaaacgcgtggctggtcttggttattctctggaactgacagacgccgccaaagattttgttgccaccaaaggttatgacattcagttcggtgcacgtccgctgaagcgtgccatccagaaatatctggaagacgaaatggcagaaatgattatccgagcgtctgtcggagaaggtgatacgattgttgtcgacttcgacaaggacaaacaggagattgttacgaatgtaaagaaaagcgagtctgctgccgaagcttgattttcaaaaatgtgataagagtgccgctgtggtttttgccacaacggcattttttatgtgatttgccataaatcgagacttttttcttaagtttgcctaaactttttatgctatgacattcttcagatgcctttgcttgctatttattttatgctgttgcaatagtaaaccgaaaacagatgcgggaatgatacgtgtatcagttctgcgtggtccttccgccattgcctttgcacactggatgaaagaaacgcccgttatcgacggcaagccgctttccgttcggataatcgattctcctgacttgatgcaagctactctgataaaaggtgaagctgatatagctgttttgccgatgatcagtgctgtcaacctgtataataaaggcattcgatatcatctggcaggttgtccgatatggggtaccctctatttggtaggtagaagcgacaaaggtatatccggtgagaacaaatcggttttacatattttcggagcaggaacgacacctgacattcttacccgttattatctccagcaacataaacttaattacacattgaattattcattcactaccgcacatgaaatcatgcagggactgttggccgggaaagtcgattatgccgttttaggagaaccgttcttgagtattgcgttgcggaaagacagcacgttgcaaattttggcagacctaaacaagcctgattcagcctctttaggatttgcccagacagccatactctatgtgcctaccttgaaaaaaagtaaagaaacgatagacagtcttttaaatacttcttgccgttttgccgtagagcagccggaacaggctatttgtatattggaaaaggaaaacatttttacatttggcatgttgacgcccgaaagtatcgaacgttgtaagattgactataaaacagtctccgaagcccaagaaaatatacttcacttcctgcaactgattgagcaatatgaacctaaagcattgggaggaaaaatgcccgatgagcaattctataaataatccgaaaatgaagaaaagcatctttacgatcctgtcgattacaatcctcatattggcctggcaactattgaccatgctggtccgtttgccggatttggttccgtccatacctcacctatttagcacgctcgttgcacttttcgcatccggttcgttctatcaatcagtcatggcgacagtgttgcgcggaaccatcgggatgtctatatcgttaatggcggctatgggagtttctctcttgttctacaaatgcgagtggatttatgaactatttcgtccgttactggccatcatgcgttccattccggtcatttcatttatactcttggctttgattttcctgaatgcggaaagtattcctttgataatcgcttttctgaccatgttcccactccttacggaaaacctgacgaaaggaatacgaggacagaggaaagagttttcgataatggctcgtcaatttaggatcgaacgctggaacaagctggcacaggtggtctatccgcaactgaagccattcttatacagcggtcttgcatctgcttcgggctttggttggcgtgctatcattatgggagaggtactggcgcaatgttcgcccggtataggcggggaaatgaaacaggcacaagtttttatagccgttcccgaattgatcgcatggacgattatagcaattttgatcagttatctttttgatagaggaatcagctggttggcgaagcaacgactccctatacattacaacaagcattgcggtaaacaacctgtgccaaaaggaaattgcgatatacggattcgtgatatttcatatcggtatggttcggatacggtcctgtcccacttcagctatactttcgaaaaaggattcatatatggcataacagctccgtcgggaaccggcaaaacgaccttgttgaacctgataggaaacattttaaaacccgcacaaggggaaatcgaaacagattttaaaaccggaatagcttatgtattccaggaacccgaattactcagccagttgacaattgccgaaaatatcgccttacccttggctgcctatctgaaaaaagaaattgctttcgaacaggcgatttcaatattgcaaaagatggagttggacggctttgagaaccgttttccgaatgaactgagtttcgggcagcaacaacgagcagcgatagcacgtgctttgacttacccttctccactcctgctcatggacgaaccttttaaaggtttagacgaggctttaagccgccgtattatcaagcgtatccgtgaacggcaaacggcaaacgggcagacaattctcttcacttcccataatcccggagaactgcatttgtttgcagataagacagttcgtttggatcaaaccagccattaagagacttttaccggtgagcaagggatagtaaaccaaaaagtagaccctttgccttccttcgattccactcctatttcccctttcaagatagaaatgattgtcttgcagatggaaagtccgagacctgttccctgtttgaacatatccaacttgacaaagcggtcgaatttaggttgacaaaattcttgaatttaaacgtgaattgcaaatgtttagataaagaactcgccggctggagcaaaataaataccaaacaattatctttgcgattcaaatataaagaaacaacccatatggtaacatcatttcatgcgctgatttcccgtatcctgaacattcctgccggacaggtggaacgaaccatcgggctattgggagaaggagcgacaatccctttcatcagccggtaccgcaaagaggtgaccggaggactggatgaagtccagatcggcaatatcaaagatcagttggacaagttgaccgaactgaagaagagaaaagaaagtatcttatcctccatagaagaacaaggcaaactgactcccgaactgaaaaagaggatcgaggattcgtgggatagtaccgaaatagaagatctttatctgccttacaagcccaaacggatcaccaaagcggaaattgcccgtaagaaaggactcgaacctcttgccagaatcgtgatgatgcaaaacgaaagagacttgccagcccgcgtggcagcctttatcaaaggggaagtgaagaacgctgaagaagcattgcaaggggcacgcgacatcatcgctgaatgggtgaatgagaacgaagaggcccgcaatgccgtccggaattctttctcacacacggcagtcatcacgtccaaagtcatcaaaggaaaagaggaagagggcgctaaatacctcgattatttcgaattcagtgagactctgaaccgtataagttcacatcgtctgttggccctgcgccgaggtgaaacggaaggtatcctgcgtgtaagcatttctcccgacacgacgggctgcctggaccggttgaaacgccgtttcgtgaagggacggggcgaaacatccgaccaagtatcgatagctgtagacgattctttcaagcgcctgctgaaaccttccatcgaaaccgaatttgctaatttgagcaaggcaaaagccgacgaagaagcgatccgtgtatttaccgaaaacctgcgccagttgttgttggctccgccattgggacaaaaacgtgtgttgggtgtcgatcccggttatcgtactggttgtaaactggtttgcctcgacgcgcagggggcattgttacataatgaagcgatctatcctcacccgccccagaacgaaaaaagcaaagcggcagccaaaatcgcacaattggtcgccacatacgccatcgacgccatcgctatcgggaacgggacagcaagccgcgagacggaacagttcattaccaatatccgctatgatcgcaaagtacaagtgttcgtggtcagtgagaacggagcatccatctattccgcatccaagatagcccgcgacgagtttcccgaatatgacgtgacggtccgtggcgccgtcagtatcggccgtcgcttgatggacccgcttgccgagttggtcaagattgatccgaaaagcatcggtgtcgggcaataccagcatgatgtcgagcagggtgccctgaaaaagagcctcgaccagacggtagaaagctgtgtaaacttagtcggcgtgaatgtcaatacggcaagcaagcacctattgacctatatttccggattgggcccgacgttagcacagaacatcgtcgactaccgaaccgaacacggacctttccagtctcgtcgcgaactcctgaaagtaccccgcatgggagaaaaggcttttgaacaaagtgctggtttccttcgtatccaagatggtaaaaacccattggacaactcggccgtccatccggaaagttatccgatcgtcgaactgatggcaaaggacttgaaatgtactgtcatcgaactgatcagcaataaagaactgaagaaaaagctcgacttgaagaaatacgtcacggacaaagtcggaatgccgactttgttggatattatggaagaactggataagccgggacgcgatcctcgccagaccatccaagtattttctttcgatccaacggtgaagacgatcgaagacctgaaagaagggcaagtgctgccgggcatcgtcactaacatcacgaatttcggatgttttgtcgacatcggcatcaaggaaaacggattggtccatatttccgaattggcagaccgttttatcagtgatccgacacaagtcgtctcgatccatcaacatgtgaaagtaaaagtgttaagcgtcgacctcgttcgcaaacgggttcagctttctatgaaaggaatagaagaaacagtttcttaatagcgatgaaaattaacaaaacaaacgtagcacgcctgctggacaaagccaaagtggcttaccagctggttccttatgaagtagatgaaaacgatctgagcgcgacacacgttgccgaccagttaggcgagaatgtcgcgcaggtattcaagacgcttgtcctccacggcgacaaaagcggctacttcgtctgtgtcattcccggcgccgacgaggtcgatctgaaaaaggccgccaaagtctccggcaacaaaagttgtgaaatgatcccggttaaagaactcctccccctcaccggctacatccgtggtggctgctcccccatcggcatgaaaaagcatttcccgacctatatccaccacaccgccggacaattcgatcacatttatgtcagcgccggacaacggggcttgcagatacggatcgctccggaggatttgatccgggaggcacgggcggaggtggcggagttgacacacgagggtgttaaaagtaagtattaggggatgcagatgatacagacgagcacagatgaaggcaaatattatcaataaaataaaggcactataaaatattttgtgtaaatggaaaatacgggattcaagtttgagtctcgtattttttactttatagatttgcaaaatgaagaagattatgaaagaaaagaatcaagtagtgcccgatgaggtgttaagcaaggagttccttagccagttcaagacagaagcggatgtgagcaagtttctgaaacagttgcatgcccaggtgctggagaagatgcttgaaggcgaaatggatgcccatttgggctatgaaaagaattctgtgacagggaacaataccggcaactcccggaatggcagttatccgaagaaaatccagaccgaacatggagagtctgtcatttctattccacgtgaccgtaacggccagtttgagccgatagcagtgcccaaacatgaaagtcgtggactttatagataaaaggatcagctatatacaattcagtactgtccgttgtttttaaaggattctcataacaccttaacttcctatccgatatttgatgacaagaaaacaaaaaaacactcgacaatacaagcatcgtttgataaaaaaacttcatataaatgttatttttgcaaaatatccagtaaatgtacttctatttttctaataacaaaactatttccgattcctttttaaatgaaccctaatcacatatttgacaaactaccgctaaactgaaaatttagcggtagtagttcaccaaatcctataatatcccccaatccctacatatggagataagccatttcggccaatcccataaccggccgtgatgcctattccccagcgacgggatgactgccgttttgttatagacattgtctttcgaaatatatcaatactatcgagtgaaggattatatccagacacccaagcatgataatcgtccgtcaagtattctttctgtgtgatcctgatcggaacaaagatcggctctctcactgtatctccctcgagtgtaatgtagatgggaaacatctccggcactgtctgaattactgtttcgtagacaggataagggatgctatctcgaatcgtgtcacgatggataacagtatctgttttttggacaaaatcgatctctgccctctttgtacatcggccggtcagaaaactgagaaaacaaagaatcaaaatctgtattacatgccaagttttcatgattaatatttcatagccatacccatatttggatgccgcccggatatgaaaaaggcggtaaatctcttaacttgaaattaccgccctatgatgatatgaaataattacgctattctaaatctatgacatcatgtaacgccatgactttgtaagctgcaatttttccatttacagttagtaaaactacatcaactagatatgctttctttgttgggtttgaatctgaatgaagtatcatttcttttaactcatctgtttcaaacacaactgccattttatttttagatatagcatcaatcacagccatgtttcctttatcagtctccatatcactacgcatttggtatatggtcatcaattgccttgaatacatatctgtaacaggctgaacggatttaatggatttaatttccttttccaactggttttgagcactattaccttcttggaagttaaatgtgcagttgtaatatatattgcttttatctcccttattgatggctccgattgtcgtaatcccattattatcaccggctgtaaccaatgcgaggtctttgaaatttttacattcattcaaatctaaatcaggctttagcccaacacctttcgtaaagaaatccaacacattcttgatgtaagatgaaaattcaagaatgatgttcatattttctataaacggaagtattccagctgatgctatttcacaaaggattatatcaatgcatccttcctctatcttttctacataaagtttggatttagcagcttctttgcaatccccattttctttgcaaataaagaaaaaagatttccaattgcattcaaagaagtcacaaactctgatatttcaattggcttcgaatgctcaatatgaaacaatatggcatccacgttattcttttgctccatcatcttaactcaataaatacaatacaaaaatacaaattttaaatacttgatcagatcaattatgtatgctataaatcataattcggtaattccaacaattcaaagagcgcttctagggacaagagctatagcatctcccaccccgcaataatatcactcatctccgcctcccgtccattctccacccggctcattccggacacaatacggatcatctgctcacggtcgttcacattgatcgaatcatcagctggaattccggcataatcagatacagccataatgtaggcttccgtatggttattatcctccggtggggcccaacgggtaatcagcttacggatagtgtcgagcttgtaatttttgaagtagttagacaatattttaaacatagcccggtatccgtaagccattgttgtaaattgcttaaacgacttatccttgcttggacggatttctccctgaaacaaatcatcgttaatccggatatttccgggattattatttcttaaacctcttggtaaattattctttttcatttttatcctcctattattaatacccattctgcggttcacgatcaccgcatttctttctctcacatcttttcatggcaagttcaagcttgacatccgaatagctctctttcaaagtaaaaagctcatcctgtacctgtcgaagccttccggtttgttctacaaagcgttcttctttttctgatagctgtttttgcaggaactcgttatactcacgtaaagccttgaactcctctacatcggcatgggcatcctcgatacgcgcattcgttttccggttcgtatagaagctaatcccccattttatcgcctcgaatcctcccaatgttccgatgattgtcaggatgtcagttaattctacattcactttacacctccttctgttttatttgatcatctttgttacgagtttttttcattgccataaggcagtgtttgttatttctccgcctccggcctgtgatagatgggaggcggatttttatattattcgcccggttactcctcttttagcggttcatccaaaattttgacatacgtcggcatcgtgaactcagagaacatgccgttgcgatctatgaagtcaacacgttgtttgaggtattgaagttcttcgtctgttaaaacgatatctgttgtttccgttatggccgctgcatcggtaaaccctatattgatttgcccgcttcccatatctttgataacgatacgcttctgatcaacctccgagatcgcgatcttactgtctatcgatactttcagttccatgttttttctcgtgtcaaactgtggtaacacggtgttgagtattaatactctgtcttttaatgtcagttccatacttttattttaatgatgttattgtcaaaagttcttgttaaacaagtaccatgtttgattaatatatgcgaatgtagcgcaatcgcctttacgcatatcaagagttatcgagtctccgttttcatttactaacggagtatttgtgtcttcgggtcgtacacatatcgcatcagttgcgtgtctcgaaactattacatgtatgaatatgacagaattataaccgatttcactccaggaatctccataatcgttgtaaacagttcccattttacttgagacagtatttcgagaaggtagataaacgttaatatatgacgttggttgaaagagataggtatccatataacctatatcgtttataatcgcattagtctttgcccccggtctgacatatcttgcggtcgatatcgcaccattcagtcttaaccccccattgcaaaataatgcgtagttgcgatagccaccattaacatttatcacagcgccataatttatatcgttgtgattagttgcatactcaaggcgcatcaaagcacttgttcccccaagcgtagacggcaaggtatttagaccaaggccggcccatttaccggaagatgaaaatcccaaaaacgcattacttcctgaggaatgaagaaagaacttcgacgatgattcacctgaatagcgattatccgagaacaatcctccactctccatcctgagtcctccgatgtaggcatccccattttgataaactttaaacggggcatttgcaggcgttgcattaccggcccagatccggacagagtttccggcagttccacctcccgataacccggcaagtttttctccatttgaatttgctatatagatactgcctctactttccacatttccgttgctttctacccggaatgtcggatcagtgggtggttgccctttcgccccggctgttcctcccgaccaaatacggattgtaccagacgccgacattccacctgtgcttccaaaagcgatcgcacccgtagttatgagtccgccattgatctccgttattgtattgtcatattttgaggcaagaacccatttagaaccgctatatctatagatattctccccatccacccataagtcatttgtccgcatacccgatgttggagccgtcgtttgataaaatacccttgccttgttatttgcagtcaattgggcgttgttggctacatttgacgcattctctgcatccgtcagggcatcatttaccccatcatacaacggttgaaggttaggacggtcggaaatgttattataaccggatgttccggatttgaatatcacaggtccggttatagtcccattcaccagatcaatcaccaatcgggctaacttgtcctttatcaatcctgtcgtgatcgtctggccggcaatctcagtgtatccataattcggaagccaagagcgtacgccatcctccggagtattgagcacccctacccagaaatgatagaaccctgtttcatcctctaactttatctgccgttcactgacatatattgagccatttgttccttcttttggacatttggcataaacataataggcaagcgaattattcagccggaaagaagccgccggaatagcccattcacggatttcctcgctaacggtaaagtgtactaactttcctgtcgtattcttgaaatagttggcatcattgtccgcattcggaataaacttcatccctataagctccatctgctgggaattggtgccgacgataagttgagccgtatgcacggccaacggcttgataagttcagtgaaataatctccttccgggtcaaacatcatgcccaaagtttccatcacgtcccgccatgaacgtttcgtatgttcccgaaccggcttaaccgcatcctcaatctcttccggcactttattcacatcatccaccagatccttaaaaccattcgattcaaggaaatcggacaaggtaagttcataccggtatgaaggtgtaccgtctttctcgatatacctttttattttggtaacacgaatctctcgatcgatatccaactgttcagaatatacgccaaccatctggccacaggcgataaagatgttttgcaaacgaaaaacaatttcatcacattttcctcgtaactggatgcgtttctcacacttgccatccaaccatgcttgcgcctcttcctgtagctgtaatgaagcgttatccctatagctttgcggcattttcaggccggtaaggataaacttgtcaccgacagaaaaattaatgtcaccgggaactttcaaggcgttttcctggtcattctgctttagtttgaactgtttcaagtcattgtcccaactgtcttcaacgattgcaaggtcatagccagccaagccgccatcctggaatgtaacgatcacttccaccccgtccaacaggcaatcggtaagattgaaatccataccggcagctctcagagtgtaatcgtcgatcttttctgttacggcaaactctcctttcggaaagatatggtcgaattgcatggacttttctatccggccgtacttctctacattcttttcgatagagaaccggccatcaggcagaagaagataatcagcaccataatcgggaccgagattcttatctgaaccgtatggataaaaaaccgtcacaggtggcgtatcatcaacagcagacacttccagttcggtaaaacccattccttcgccctgtgccaagacaaggccgttgcttgaatactccctcctgccgatatttattgtctggccggatatccagtattccgtatccaattctttaatgagttcgtcaagtaccgtcccgactttcttatctttgaaagaaagggtaaccatccgggattcgatacaggatccggccacccaaccagatcctgtacggttcatgtttttgacaaatagggttagccagtcacgggcggtaccggtgtaatagtcgaagttctttttccgctccggtgtaccatgaaggaaaaactctgcatccaaaaggtcataccgacttgaatagaactgaacggtatattcccaaccaagagatgtctcccttttcgtcaccttctcgttatgccggaccttgtattttgtcccttcaaagtctatatagtcattgatctgaagctctaccacattacgggaaagaaaattcaggataagagtgtcctcccccatgatctcttcgaccgtataactgttatctttcagatagacatcacagactatcgtatttccgcgctttatttccatactgctaaataacctacttatttttaggcaataaaaaacacggcaaccggatatatgacattttaccggttgtcgtgttttaatatataaggcagatgttctgtttatggtagatttctaaagcgcaagtccacacgcgccaaaagtcgtagacaacgctgcaatctcacaccagaacatcggcttcgttgatacaaagtcctaccatatattaccactcaaccgtttactcatgtctattaccgtgtaaacgataaaagccagccacaccagaataagaacccaccagaaagacgtgcagccaacccatagctgagaagaaagcaacgtcaatgccgccgatccacaatgaatgcggtttatccaagtgtctttgaaatcaggagccaaaccgacaccaatcaaaccgatacaggctgcgatcgccagcaaccgcatagtaaaggttgtactcatttcccaaatgaccgggaataggaacatagccgtcagtgccatgcttgctccaaagatcaatttatgatcaagagtataatacgtcgcactaattgagtacggtacaccttttgcctttatacaaactgctgccatataaactgcgataaccaaaaaagaaataattaataataacatgattttcaaactttattgtttaactttgtttccggagaccctcggtccccctaattttctttttttacagcctccaatctgtgatagcctggaggctgttttattattctttcgccaccgaacattttatatctccatttattttaaaagaaaatacccaacctggggttggcgattatcaataattttttctgaatatacatttgctgtctttctgctgtgacagcccaaagacagtgtcactaatttattaatacggccttgcaggcggagtgaagtttgatgtccaacgggcaatattactgatgcgaaactcgtcaatcataccgttcagatacaatccataatctcgatattttccgatcattaaagaactatagtaccctgaaaccatcgttgatgtgaaaccagacgcatacactccatttacatacactttccaatatcgagattgtgacctgacgatcgcaagatgaacccactgatcccgtggcatcgtaaaatagcatattgcatcccctcgggttccaccatactgcaatccaaagaaaatgcgtccgtcagattcctccattatatcaaagctataatttccaccaccattgccttttgacattataccgtttctcacaccacttttcagtttaatccaaaaatcgacggtatagtttggatatagggactcgtttatggcattcgttccacttacctttacatacccgtttcctgaaaacgaaacgcaattcttgaattttcccactacataggacatattactaccaacataaggcttgcctgagacttcatctttcaatgatccatcaaaatgtagcaacagcaaagtattcttgtctactttcttccgtcccatcatcgatcttatcataccaacctcctttccgccgaaagtcggtcagatactttagttaagaggtgtttacccccccccattaacatttgtaaacaattatttctcatgactttatctcctattttttagtcgttaatatcttgtttcatctttttcaacggcagatcattcttcgtaagcccagtatcggatcaggacagtgccatcaccgcctcttaacgatgttgcaccagctccaccaccatacccaccaccacctaaagcccccccgttaccggaaccttccttataatcagaaacacctcctatattattagttcctctggcaccagcaccacctcctgcatttcttttgccggtcggttctccaaagtctcgagtcgtatggccttgtcctttacctttattataagcaccatacaaatatgtagatccgtctcctccatccgagcctcctgcacctgttgctcccataccttcatcacaaccaccgccagatccaccatttcccccaacatatcccataccatttccagaattgtcccatcctttattgttcgtataaccgccattggctctatagctgatatttagaaactgggaataaccaccattagctctaacgttacctcctgcaccaactataattggaatagcctgacctggtgtgacaggtatagcatcaccatctttccatccagtcgtatcttttttgaaagtctttgtatagcctcctccggcaccagcagcattcccattatatccactacctcctccaccaccgacaagaaacacatcaacctccctacatcctttaggtacgatccagatataattcccggcaggatagaacctcttggtgaacaactgcaacttcttccgtcccatcatcgatcgtctcatctacgccctcctttcttacgataagaggtcgtaacttctttatttagagagcattttacccccccccccgtttaacttttaataacataacctgtttcattgctttacctcctgtacaattgtgggcaagtctttcaagtcgttcggataacctgtaacggttgtcagaatgcagagatagatcacaccgtattgttcataatatttgtctttctcgaatgccataccctgcacgtatggaataggatcatcaagcgtgcctgcgtgctcagcttcaacgatcttatacagtgaagcagtttctatgtccggtttccaatcggcttgcagcttgtgcttttgtatcacttcaaacaaagtgtcgctttctccttccactactcgaagccggaagcctatttcaacttccttgccaaactccgcatctttctcaccccaaatggggaataagacctgcatttccaacgcttgattagcggtaagggaaacgctgttcaccatcgagcgggcaaaggtcactgcctgcgcttccggggatttagcgattgccttatcagctttagtttgcaaggctgccgttgttgtatggatcatttcaggatagcctttcaccacgatagcttcgacctcctcggctgtttgggcggcatcgatacaggatagcaagccgtctgtcaccttggcgcactgctccgaatagtccgctatttcgtcaagagcaaccgttaagatattcgaggcgtaaagatgaccgcctacttcgacttcttcctgccggccacacttgtctttcagacgaagcgtatcaccggcataggcatcctgttcgtcgatgtagtaatgatggatgtctttgtcgtagatttcctgccgtttggcatcacgggcacgccagagcaattcttccggagtcggttcaggttctggagtgggctgcatgtgccaacactccaacggggttgcatccggatgttcgttgtggtactgttcctgttcttctgagagcggaagataagccccaacctcataatcgtctatatctgtacttatgagataggaatcaggaagttttactttcgttttccaaaaattaatgtctttatgaatgtatatcatattgctattcttaattgtgataatataaacaaattataccctgtcctccttttcctcctttacgtgacagactaccacctcctccgccaccagctccaatgccaccatttccgccattcgtaggattgcttgaccctgaatttccaccatttccacctgattcaagacctgccgccccaccacctgctccagatccatccgaaccagatccgttcgagcctttccccgaagttccacctcctccaaataggccaataggaataagtacattgttatatttatatcctgtaccaccttgataagattgactatttccacctttataaccgcccataccatctgcattacttacactgtttccaccggtcattcctgacgatgaatttccattacccgacatagatgcgcctgaaccaccagcacaaccgtaagaaccattccaataaccaggagagcctccaccattattacaaatcgcgatatcggaagatgggttttctaccaactttgatagaatggtatatatactgtctggtattttagagccattaccaagccctcctgctccctcactattacctctttgccctccagcacagattatcgtatccccgtttatttcaagagttgtactatccccatcagtttgtgcatttacaggctttgcaattttacaagtcaaagttttcggtagcaaagagatttttatattacgagcaaatgctattgttccagaagctccaccgccaccactgtttgtgccacctccgccgccacctccaacgattagcaaatccacaaacttatattttttctctattatataattctgttggatacctaaaggacttaccagctttaccaatttaggcactgtattatatagattacctgatatcaatctacgtttcatctcttcctgttttgaattataccctaactactattatcccgtgttctttcttcaaggatacacctgtcggtttcccgttcggtaacgttacacttgattcctcggactgccagccagaaccattagggaccggttggtcaaagtccgacccggaactgttcaagatcgacagatagaattcctgcatttccggtacgctggcgatatcggcaaagttgatcgcttgcggggatttgcttgtgtatttgaagcgaaggttatacggtgatgacggaagagccgccagagactcgacatcgacatactctttcaacctcaaagagtccgataccttcgttttctcttcattgctgtaattattgtcggtatggacataagcagcgtccttgaccgtatggtcgtcattctgtaactgggatagccttgtcggaatcgcctgctggacgtttgtgatgctctggttcagcccggcaatgatcccttgcaacgtctgtgtgtcctctacgttggcaagaaaagcgatgatctcgttaaatgactcgatggcactcgatgcgtcacccgaaacgagcgtgttgacttgctgctgcaaggctgtcagcgcgttcctgatttccgtgtcgtcgtagctttccccgtcctgtccttcggctaccacacccgtatcttcgtcgcctattttccagtgcttcgttgccggatcgatcgaaggaaccggagcattgtttccccgaaggttcggggtgtcaaacttaccttcagccgtcgtgatcgtcaggatataggtcgtggcatcattcgttttaaccgtgaccttcacctcctgcatgacggccggcaactgggcaaacgtatgaacgccatcagccagcttcatgttgaatttaccgttttccaaacgttcaaataaccagactgatgcagggtagacggttgcgttatcggcccattcagccgtcgtcagttcgatctgttgataaataaatgcacctttcttactcattgcttaaatatccttgttttatcgttcgtactgattcattgtaataattggctcctgtcagataaacattaccgggcaaggctgtaccgctgccggattcctgccacgaggcttttcccccggcaagatcataaagccggtagaatacatattcgccatcttccgctacacgcacatcatcaccgatacgaaaattgatggttgtaccgtcggtattgacatagctcaatgtattttcgtccgggatagcctccaacgtcgggatctccggtttgttcttgatgtagttcttattgacaggatcggtaacgttccagtcgggttgtagtccactgatgactccttcggcggcttcggctgcacgattggcgcggtcggcggctgtgttggccttgccggttgcgactatggtatcttcctttgctgcattagcagccaaagcagccgtatccgccagccctgccttttcattggccagagtagcggcaacattggctgtatttgccgccttgtctgcattttcttttgccgtgtttgcggccaaagctgcatccgtcgccgattttgtagcagtctcggcagaagctatggtatcatccgcacgctctacagccgcattagcattttcagcggcagttgtagccgaggatgctgcttcattcgctttatccgttgcggtattggcatttaatgttgctgtgtcagcctttcctgcggcatcattggcctttcctgcggctatattggcttcaacagttgctttatctgcttcttcctttgccatattggctgaagctgctgcggtatcggcattctcggctgcggtattggctataccggctttttcctccgccaatgcagcggcagcaacagccaatttggtcgctgcatcagcatctccggcagattgagttgcttgaccagctgcggcatttgctaaagctgcggcatcatttgcagccttggttgccgcctctgcgctcacttttgcggtgtttacattcgatatagcagtattagcttcctccttaatttgggacatctgttcacgaacctcttttgccgcatccgttgccggcttcataagttcggccttatcagtctctgtcagatcagaaaaatgcagtttcaattgatccacttctgctggcgtcagatcggaaaacttcattttcaattcttcacggtcgaaaatatccacgtatgcactatccggctcaccttcgtatttcatttgaagcgtaccgttcaactttcgaaaaaccggcttctctcctttcggcccacgaattttctcaatttccaacagattctgccaagcaccattagctccttgtttccaaaggatgtatttatcgtttatccctaaaaacgcactaaggccgggatcgccctgtttacctttcattgcagagggcaaagcacgcttaggtctcccaccctgaatgatcaggatcatatcattatcggttattgttccggctgccggaagcaaattagccctgattatttcaaattcttctgccatatcaattgaaaactattattctaccttgctcgtctgccaataaccccaaatccggatccttcagcacacggtaacgaacatcaccgccggcatctatccaactcactacgggagcaacaacagaaatagtgaatcttgcccctatccggttctcctgccagacttccacagaaaaggacgggcaatccgtatagtacacctgaatgataccatccaatgtcttaatatataattcctgatttcctacaccggatatctggctaaagaatgcccgatagttattcagaaactcttccacactgccggccaacatccaaagggacagttttatttcccgatgcagggttttgattgtcgaaaggtctaccgtacggccatcggtgaacggcgccttaaccgcaggatatttcaagatgtcctcctggttatcgtccgatcctataccgaagtctgcaaagtctatcccattaatcgcatactgcccgcgaagcccgataccgccggccggagttgccggataaatggcatgattgtcctcgacaaaagaaagttcaaacacagatacgttctcccctgcattaaatggcacaggctgttcgtgagaagagccggcattgaatcgtaagcggttggtcataccggcaataagattgaattcccgatagcccggtgcggacagatcagcaacaaactttctatacccagaccagaactgctcaagcgtttctgccttcatgaggaatttcaacttgacggtcttaggttcgaactccacaaccgagagatcgggatcgattccgtcggcttccgcccagttgttatatttgactgccttacgtttggggtatttcagaagatcatcaaaagaaccttccaataatttacatccccattcagtatatacgtcttttccatctattgtcataatacacgtgctgtatggtctttatgagttattaccttaccgccagcgttctttacgaacaccacggcatagttactcgcatggatctcggcttccgccccgtgcatcaggatcacgttgtagcggccgatcgtatcaaaatgaaggattgccttggaaccggccaagaataccttcaccggattcgtcagtttcacgtccgtctcgatatagatacccatgctttcggccttcttgccccggaactcccgtaattgttccatagacgggaaattattcttcgtgcagaactccgtaccctgcggcgtcagcagaaggcgcataagctcttctttgttttccgtgccatgcaacaacctacaggcacctaaccggtttgcgatctcaaaaaactctttgtccatcatgttacatttttacttttacgttaatagtaccttccagggcatcaaccgtgcctctagtgttctccgatatcttaccggcaacctctttgatctctctcgtattctcggcgatccgatcggtattcttttccactttatctgatagttcgcggatggccttcacatcttcccaacctctggattgcatatcatagatcagcctcatttgttcacggatcggttgcataccgccacggatatcttccagcaggatacggacggccccggtctgtccagccaataggtcgatgctttcctgggaagctttggcatacgcgcctttcagggtattttcggatatatcttcttctttctccggctcttccaccttatctttcatcaggctatcagcccaaccgaactgcctgtcaatctctttttgcagttcttccgccatattatagatataatcctgttcccagccggaaaggacattgtcggcatagaactccttcagcttgtcacgaatcttctccattgcaccggaagattccgttgcagccttgatggattctgtgaccatctggcgcatcatcttcttgacggtatctttcgccgattctgcccggtcttcaccggaagcccatgcttcggcttgtgcgttagcgaagttgtcaatggcggatttcaggtcttcaccgaagatggcatctttggccttctccttgttttctgctataacgtcgttgatttcctcgatttgttcctgccactccttgatacggctgtcatcagtttttttcttgtcctgttcctctctgatctgttgctggataaggatcttctgttgctccagcagcttgttgttctgctcaatcattttggaagcatcctttgaataggccttctcgattgacttttccaacttaccgtaagatttatccaatgtatcaatttgatcctgcaatcgctggatacgtttctcgttcttcttgtcatggattttggcgatggcaccggccaaagaggtaactacgccaatggcagcaccggcagacgcaccaatcggtccgaacatggaaccggctttcgcaccgttcattgcagaacttacagtgtccatagccacactgaagccttcggctatcccgccgaatacaccaccaaacgaatctccgagcttcgaaaacgtatcagaaaggaactgtccggcctgcatgatctcattcatgccctcctctatctcagccaaaccctcttttaacttcttggcatcactttcagaggtaaatacttttttcaagccatttgaaactttattaaaagaggtttccatttggtcggcttcacggcggacattggctatttcatccttgatggccttcaactgatccggtgacttgcgaagcacatcaaactgctctttggtaataccgaatgaattatcagatgaatattcccctctttcaagaaaagacaagaatttttccgcttcatccgcaatggcacgaatagaggtgatattctttttactcatatcatcaaacaaccgggtgatgatggaggtgctcttttgggcttcattatccacgtccgccagctctttcttcataccttctgcaagggaaagccgttcaccttccgttgtggcctttgctatcttctcattataaagctccgtgatagcctgacgcttttccaaatatgaaccatattctttcaggtattcgttcatggcgcgttcttctgcttctatctgctcatggataacatcagatgtcgcatttcctaatttggccccagcattgacttttgccattcggatctcaatcgtctgctttttggtcaactttcctccttgtgcctctctccattctttttctcttgcacggataatatccaactccctgtcataatcaagattcaactgggcgatcttcttgtcggaaccttctttcattaggtcaatttcggattgctggttttgacgacgaagggataaaagttccttttgaagttttttctgtttctcaagttctttctgatctacaggttttgcaaacttcgtctcttcttgttttgattgtttatttaccaaagcctctgcttttgtacgatcttttaatccttgtacaacgatctctactgctttcgcatgttctatctttagctgctcatttcgttttcgcaaccgacgtaattcaagtgcttctgggaagctagtgtcaatccaactttttttatctaattgagaaatccgtttactatttttagccatctcttcttcaatggaattcacagttgcacgttgttgtgccatagtacgatcatctatcgacttggacaacatcttattgacttcaaccatatccattaaaaggaatttctgtagagaaagattcttcaattcattcggataaagctcttgtaactttttataagcttcaaccttttgcaaagtggacttattttcatcttgcaacacacccaacatttcttccgtctgacttctcattccgtcagaccattctctcatttctgcgactctcttattatgagcagccaatgccttttctgaagctgtagcctgtgtcgcaagtttgaatattgcatatcccaatgcggtaacacctgccacagctaatacatatgggtttgcaagagctgcctttcctgccgccaacatagcaacagcctgttttcttaaagcaccggtaagtaatgctgtagctgtcgtatgttgaattgtcgctaaccggcttagagcagatgattttacatacgaatgttgagctacctgaactaatagaatagctgttttatatgaaagaaaagctccagctgcattctttaccaacgattcaaggtttgatattgtaccttctatatcgttattctcaaatgcttcattaaaagccttggcaatatcggagacttctttcagaatcttctctcccaaaggacgcaaataggcctgtacattattagccaacaatgtaagctgattgtctgcagcatctttcatcttctcaaacgcggcttccgtagctcctaaagagttctgtaactctccgagatcactcgctgccgacttagcattctttccggtcaaagccaatgttgcagccaatccttcatccgtaccgagcatttccttcatcttagaagcagaaccgccagccttctcattaatcaactgcaatgcttcctggaaagtacgcccttgaaaagcggcatccccaagttccccagcagtaccctggatagcagcccggatttgggtcattgcctgcgatgtcggcgttccttgtttggtcaatgaagcgactgcacccagcacctgatcaatactgatcccgtatgcggccgcaataggtgcaacctgggctatggaggctcctaattcgccaaatgtagtcttacccaatcggacagttgtaaaaagctgatccgagactgtaccggcctcctctgctgacatcttataagcattcaagatcgttgtaacagcatcggctgccgtctcggtttctgtaagccttcccacggctgctttagccgaaacttctagaatcttcataccatctgccccatcatgaccggcagaaacgatactataaagtgctttagcggcctccggagccttgatcggtatctcttgggttatagacataacctgattcataaaaccggtcatatcatccgtcacctgcgtggaaatggtcgccacttccagcatgttcttccggaactctttttcaaagtcgtatgagctttttgcagcttgtgcaaaagcagttgccgcactgataccgataccactgaatatatcaaaagaggtcacctcgcttgccagagtcttgataattcccatagcctcgcgtttcccttcgtataaaccggagttgtcgataccagtagccataaataaggctccatccctatttttgattcccataatccttttatggtaaaatataaactaaaagcatttgtattcaggaatcttttgtatatttgctgtatgagtccaacggttttttataaaaatggaatgcgtttctttttcttctctttagaagaaaacagaatgcatatacatatcagacaggcagaaaaaaaggctaaaatttggatagaaccttctatttctttggctgagaataaaggtttttcttcaactgaaatttcaaacatactaaaggaggtacaaaaacatgagcgtattattagagaaaaatggaacaaccaccgcggaagtaacaatgattaatgcacgcggtatcctccttttcgtaggaggaaaggaatattatctatcgtatgacagatatccttggtttagaaatgcaaaagtctcggatgtattggatgtaaccatgccggatgaagaatcgttgcgttgggatgcaatcgatgtggatcttgagattgacagcataattcatccggaacgttacccgatatctttttaacgaacaaagccctgctaacttcacagtccgcagggctttcttactaccaaacaaatcaaaatttatcactatgacaaaaccttttctctactttcaatgtaatatatagttatgcagataaaactttctttatccgtttcacatggcctgtatcgaagtcaaccatttcaacccattctccatcttcctctttaattgacgtatcttccgaatgaaaatctttgacccttcgattcatcaaataaccacgttcacgaagcatgccgaccaacaaaacaaagctgctatccaatatttgttcatgagaatagccgaaagcctcgttgcaggtcactaagaacatgaagctgctttgagggccttcttcttccatgtctcgctgtttttctgaagggctattatctccacttcgcttaacgggctcacagcttccagcgctatgatagtacgagaaaaagggttacagcctacccggtacaagacggcattcagaaggatatagatatcctctcatgtacagttgtctttcagaacttcccggaaccaggccggcatatcacctttcttattatgaatgccaagacatacgatttcaaagataagttcgtcatatttggctatcagttcggcgacctgattggaaaatcctttattcttatcagcaatcaaaacttctctatcctctttatcgatataaagcaaaagaggctttattcgaaaccaggtgcggacagtgatcggggttatggcgatactatcccctaccgtctttccttccggtaatgattcaagccgggtaaattcaaacggaatggttaccggctgacaagaaacggattcactttctaactggagtacttgttttacactcatattttcgattaaaatataaaagccccggatagttccgaggctttcgataacctaaacaacagtccttaattattctgctgcttgtacggcttctgtttctgcgcttgtcttctctccggaatacaaaccgtttgccataaacttgacaaggattttatcgccttcattttccggctggatcatataactgtcaccaatagccccctcaatatcttgggcttctccctggccatccactttacgttgccattggaaatcaccagtcgcttccgcaggtgtcaaggtggccataagcgtttcaccaactctgggtgtaccggtgattgcaactgccgttaccggagtaagggttacattcatcaccgcccgaccgaacgaagatcgttgctgcccagcagaggtaattgctgccaaacgggtacatttaactagcaaaaggtctgtttgttctgaagacggagcctgactcaagcgggcactgactttacaaatggcaaatgtatattccgtatacttacctttgtacggtgttgtctgtatcttgaacgatttgcggatatttggaatatcaatcggagcattccacttaccaccacttacagaaccaccacaaaacgcgagcatctcctgagctgtcggcgacgggatagcaaattcaaaactatccgggtcgccagccttatcgaatgactcccagggatctttcatcccttccgcacggaaatcgacagaggtcgcttcattgaaattgaaagcaactgagccttcatgaacgatcggacactgtgtataaatagaggccggaacaccatcaccggggtcaccatatcctaagaaggatacgcctaccgccaaacttctttcattagccatattcttaatctatttctgttattacttcaaatcttatattcgtacaatcgaagccttcttttgcttcgccaagaggttcggaccatacgatccgagatttccaatacatgccgaaaggaggtgtgatatttcgtagtgcagacttaacttttcgtgtcactcctttcattagctgtcgatcaggcctgcctttcgcttgattcttcacaaatacgttgatattaaccgaacctttattcacaacctctgtttcatttaacgtgagcatccggattgtgatatgattctttgtctcaccatcaccagagcgatctttgtacagaataaagctcgtactgaccggttcaaccgcatcatacacgatatctactatatcaaactgatcagccatgttcaatatcctttctcagcgagtttatcaaataacattcgactctgtttcttgatccaatcctcggcatgttccgtggcaacggagataacatccagattttcgattgcttccacatacttggcataaggcatagcggctacaccaatcaatacccagccattcttataaaggggtagtaattctgatacgagccttttagcctctctcaatcccgtatatttatcggtacctttcttatctgacaactcgtagttctcggtcaatatatcgccatccttgacgatcacataaccgatagagctacggaggttaccagtatgatcctgatagtttcctttctttcgggcaatcttcacgaactcttccccggcacgttgcaataatttgtatatccgctcttccgcccggtccacataataatcgaaccaacgttctacttctctatcgctccacatcggagtcaaaccacctttccttgccataagctacacatagattacagagtgagtctgaaacggttcccagctaatgatatccacatcgagagcgatactgtcaatccggatatgcttcgcattttccacaggacgggcctttgtcgagaactcaccgtgtacgataaattccttcccatcgacattccgcttcaattgctgtccgctattggatggaaagtattgccctgtaacctctatttccgtcggttctccggcaacccattccccttttaccaattgtccggattggattgttactatcgctttatgtgaataccgtcttaccatctgtttcgtgcccttccttttggaacttcaatcttattcccgatcagttctgctttctccggttctccaccttccctatacagccgttttgccgtagcgtcataccaggaacgaggataagtgatagagagtttgttttctgtgaagtccggtagaccaccgaccattgaatacaggtcggcagccaccagcttttgtttttgaatatcgatcgtcttactatcctctgtaccttcaaggccgcgtcccggcaaaacgacgttgtccaaaaaatcttcacagtcggcaagaccgggataagcaagtattgtatctcggatcgtcttatccatggccgttattctccgttttcggtatcctgaatcgtttgatcttccggttcaacagtttcacctaagaatgttgccgggatatcatccgtaccttcagtatcttcagatgcgctccaatccttgccatccaccttcatgatgaacatggcatccggatcgtttacgacagggatagcatttgcttctgctttcgtccattccttgaacggttccagttcagaccatttggtaaccaatacccaatcctgttttaccatgagggcaatcttctgcaaggtagcggaagattcggctgcaatcggtccgtgttggatatcaccaaccttcaaatcctccaagaaacatacacgtttacgctcccacggattgatcgtcttacgacgatgagccttgtcctcgatacggacagacggattcacagtaatgatcttcaccgggatttcctgttcggccagatactcgttgataagatttttcgtcaccaatatttttgaagacgaattaacccatgccttcaatgtgtcgaatgttgatttctgcttcttcaacaaagagaagtcagccacgtgcatcactacatagcgaatcgttactccctcggcagaagcagcaacaaccgtatcttcgatatcctgcaagccgttggccgttgaagcgttgctccaatctacagaagatttacgctggttcttcttcggcataccacaaccaacaaactcagccgtaacgacaccgctattattctttgccgacaaatggaaacccgcacggctcatgagctgcatacaccaccattcgaaacgggcacggacagagttatacacgaaatcctgatccttgaaagccaggttcagcaatgccaattgatctgcgtcaccctgtgcgtcacgttccaactgtttgtactcgttgtaatcactttcgttcataccacgcttaacggctatctttggaatatcaccggacaacttgctgattacctcgcgcgtcttctgcggagcggaagcgtcaaaagagatcacatctgccattaccggagcacccttctcgccggtcagtgtctcccacttcaacgaagtctttcttttcaccccgaagaagttcgggaaaacgactggtttcacatgccgggtattcaaacgagccgccatgttctttttattcacctgtttaattaaacttctttccatatatcagattttaatggattacacaaaacggataaacgacattaatgcctttaagtccttatctaccgggaacggcatacaggattcgtttaccgtacctcttaccaataacccggactgctggttagctacagtcaagtcgactttattcatcgtgacgaccaattcgccatcataaggtaacttggcggctttcgcagcctgcttgtctttagcctgaaccaatacttgaccttttgttgcagccccaatcgttgctgccagcgtaatcgtatcgaaatccgcattactcttatcaatagctgtgatcttatcggaagcgccagtcaaagcgccaccaatcgtcacgaagtcacccacaccgaacagatgattcttggccaccttataagttgtttcactacctgcatcggaagccattgccgtcttcaatacatgatacagccctgtttccggatcttttactactattacaatcggaggcagttcgtccaacgccttgccattgaacaaagcgttctgcaagtctctgcgatcaatcgtcccaccaccgatcacatcctcaataatcttttcaattccgggaggatactggaattctctttctctttttctgtacataacgttacactttacttggattattcaatacccaggtttaccacaccgggattatttgcactattatcgacgtcctgatccatcagcttcgcccaatccgcttcggaacggtcctgaagatttacggaaccgggagcgtaatcgccacgagccacagcatcatcgatcgccttttgctggattccggtatattcttcggatagtgtcttgatctgatcctcgatagacgtttcagaagccaaatccacacgtcccagccagctgtccggaagaccggcatctttcaactgcttccgaactgtttcttttttggcttcgtttgccgagttagtaatggaatcacccacctttttagccatatcatcgacactcttcttcatactttccagataagcttttacttccgggctaagatccttcaacagctcttcttccgttttcttattcttatccggatcttccaccggtttaccgtcttttaatccatgttttgcttcgtatgcagcgaccgcagccgtttcagccgtagtcttagcttcattctctgcctcctggatagccggaaggatattttctttgaacaggtccacaaaagcctccattccttcagctttttcgattttgaacgtcttctgaatacgttccgcatacttctctggcacgcctttcgtcttacatgccgccttgattaaatctaaaattgtcataagagttttctgtttaaaatataaagacgattaggattttactgacataaaaaaagcccatggacacgtccacaggctaaaacttttcagtttttatttatctccaaggtacttatctatcatctttatgatataatggattataatctctttcgagatttcccaaataaatgaaaacaatgtttccataattgaatagttttttattcttaactatcctatcttgatgacggagagtaacacgcactcactgcgcattctaacctctctttctttttatcttgatgatagcaacctccggcaagaaagtcgaatccatcaacggttgcatttgcaaaataatgaataaatatttgcataatcaaaaataagtacccatatttgcaacgttcaacgaccaaggaacaaagttttattatatgaatatactgtataggattttttatgcccatatcccaaacacaaagatattaggctgtcaaaatccctactacgttacctatacgtataattcgtataaaacgtgttccttggtcggaatgggaggctgacagccttttttgtatcttataatttcattagtaaaaatgaccaaggaacatgaaattacaagtggcatgaataatagtagtgccacaagtacgtccacccacgaaacgggtaagtactccaatcctgaattgcaagctatcttggcttccggttcaccgtattcaactttagaactccaggcagcttatgatgccggacgcgctatcggtagaaccgaaggtatgctttcgtaccaacgccacatcatgaaccagctctttgcagagaaccaaaagctcaatcagaaactacaggagcagaaaggaggtctgaaatgaaaaagcaagtattgcctttgaaagaggaacgagaagaactaactaccatgctgcgtgaactcaaatccgtcaagtcgcgtatcgggaattggctggataatgacgaagccccgatgaacgaggcttattctatcaaactggaaaaaatctatgacaacctgttcaccattatgtctgacattggagaaatgataggttatacgattttccacgatatcaacgtaggtgtggaggaacagccatgaaagaagccaagaaatacattaaccaccacaaggtaaaactctccggcaagtggtatatcactaaggttcgtgccagtgaggcagtggagatagcttttgaggaaggaagaatctctgcgggaaaagaaatttccgggaaaaagaaaatctgatttatatattatttcagaacgttctaatccggagtccgtggctgttctccataggaagatattaataaagggtattgattggaattgcaaacagccacaataagcaattccggtctttgccctttcacttttaaacgcgaattattatggaagcgaagatacaatatttccaaagtccgatattcggagaaatcagagttacggttatagagaataaaccgatgtttgtagcaagtgatgttgctgctatgttaggatatagtaaccgatatgatgctatcaatagacattgcaagggggtcgtaaaacacgagggggtctcaatcactacaaatcaatatggtaaaagtacggaacagaaagtggaaatttcgtttattcccgaatccgatgtctaccgtctaatcatgcgctccaaattgcccgaagcagaaaagttccaggattgggtatgtgaagagattctccctgccatccgcaaaacaggaggctacatggtcgccaaagcagatgagactccggaggagattatggcccgtgccttgttggttgcccaagataccatgaagcgcaaagaagaacgaattcaacaactagagagaaaagttgaaaccgtggtaaaagaaaacaacaaattacgccccaaggctgaatttatggataaagtaatggacgcggacgagcgtatcgacattggccagtctgctaaaattctgaatctaccgttcggaagaaacaccctgttccagaaactgcgtgatatgggcgtgttcttcaagaacaagaacgaaccgaaacaggaatatgtgaaacgtggatatttcgtcctaaaagagaaatggattgaccgcaacaaccatgacggtttcatggtcttgaaagtactcgtcacccagaaaggattggagttcctcgccaatctatttaaggtggtagagcagccaaaggaggtggcagaggtaatttgattaatttcaaccattgtgcagatcgtaacaactggggtcattacgacctcagttgaaacacggtgttcagcaccgcagttcaactattgtcctgacgacaatagttgatttgacgattaaatttccaaaatcgttagacaattaggagataatttatatttttgcaaaagagtagtctgatagattcagccgtggattgtagttctacggtgatggtctatcgggctacttcttttttatgccagtcaagaccttatcactatccgatatactataaaggacggcattcccggttatatcttctctaacaataatccaacttttctctccgttcaactcaatttcaaaaacatgagaatatttaatcataggattatccttatggtattcagtataccccttgtaatccgaaccggcaaatatcgctcctatattttttatcaattcgttcttctctttcttgaacttatgaggctgattcaagaactctttgatagactttcctgtcattttaactcgtaccggaaaatctttatgagagaatgagccattcaataaagactgctttgcccaattttgcagctctttcgttctatcttttgaatattggattgaaatactatctctttcaatctttccatcccccagcaaccattccgcaaactcctcatgatccatcatgaccggcgtagctatacagatgcagaacggatgccagcccgtaaacttaaaatccttcgagtattggccagcctttgcatcacatacaggacacggaccgtgattcgatggtgaacgttccacctcataaccagtcacgaagtccattttctgccaacgttcgtaatcggcagttcgaaaagccttattggtctccgttgcagctaaacgtagagcgtttttgtaagacgaacggtaaacaccctgccccggatgatagtctttcattggctgggatagaaccagcttcccattcgcgtcccttacacggcggaaacgacggttgggttcgtttagcaattgccgtatatcttggctgatcaacgcggctggacggccggaagataaacccgaagaaagataatattccagattatccatagccccgtccgttatatcccaaacacgggaggatatggttttaccaaattcatctttacgtttcaataaagtattcagcgcatcggcattccgggaaaacaatttttcccttagcgtagtggagatagccatatccttaatatagcccgttaccagttcatccgcttacctattgcctaaattccatacatcggtaactgtattggatatattgcttacgagctgcgtgtgtaaatcatccaacagacgttctatttgcttttcaatagtagcattacctatccatacacggtcgccgccatgatccgaccatttagccagaagaggtcctaccctacggacaaactcgtcaaacgaatactttatgctgccttgttgccggaacagacgttgcaggaattgtcgctcatgaaatgatagttctttcattctccatatcccattgtcagaccaaccatgttattacgttgcgcagccgtatcctcctcttccttcatcagcttcatttcttcgtccaagtcttctgttagcggagaatgagccgtaaccgtgcgctgagcgttaatcggtttgcctccattggcaatagataaggtttgcagggtttcagccaaatcttccggcaaaatggaaccaaattccacatcgatcaggttgttcaccaattgaggacggtacttgatgttggtaatattgcatatcccagccaacacgaccgacacgcaacgctgaaccaccggaccgaacgtttccatgttctcgctcgccttgatagtggcatccatcagcatgaatttacgggcaacaccggacaggttgccaatacctttcaaattgtcaaaggaaagatccggcgtggatgtaccggaaaacagctcgcatttggtttcttccaactctttatccacagatggctgagagccgttccaagtaagatattccgcatcgccatgatacaattgttgcgtttccggatgtactttagaagtaaaagacaattcttttccgacagtgtctttagtcggcaagtcagccacatcgaatgttttcaacatcggatcaccatagtaatcatttgtatccaccatgcgagaaatacgcatttcacgagcatccatcagaagcgctacttcatcccattcaggttggaatacatcggcatacacaaccggaatcttcccgaatagattgggaacctcttttatcacccagccgcccatttcatcgatagccgtaataatcttatctgccgtccagattgtacagctgttccggatcataccattagaatttacttgataacgatggataaaggcatccatatcatcattatcgtcgaaatggggataaaattcagataaagtattttcattacggggaacagagagcgttttcaccttcaactccgtaatcaatttgccgtctaatcctttggatatatacggatagaacacaagagcggccttactttcagaaagcaccttgcgtgcaaatgacttcaaaacggattgcatcttcaatcggcgttcccatacacgtttgaactcttggaaaccatcgttctgatcagctccggtaatcatcatttgcccgccaaacaggaaagcgacagaggtacgcacctccttcttcggaaagttggttacgatacgggccacatctacgatcttatcaggaaggcgtactggttcaccatttttatccaccaaagtatccgaatagacttctaaacgtttaggctcacgccagccaacagaggttttacgtctccgacgttcgccattatattcgttgtaatattctcttggttctcggtattctatcgtatcgacacatagcgtactaactacctgcccaaaatcttcatttgtaaggatgtcgtttatacttggcataattgttttatgctaaaatataaaacgaaaaagcgcaatcactttaaatgatcacgtttttatttaatcgcagccgacttacctatgggataatgttctttctcgtaagcaatcactatatctgacatcatcataagttcaactgcatttctatcgtttgcaggtgtattatcatccaccaatggtaacagtttctctattcttgcttgcgcaaactcatattgtttatgtgatatcatcttcgttttgtctacattgggaagtaaaagtagcgataattttgaattataaaattatcccctcggaaaaattttataaaatcgaattatctactccttgctacccgacgtacagagttagccttgcacaacttgatgaactctacattctcggcaaggatcgtcatgccgtccggcgcatcatcatgcttattgccaccttctttcttatatccggtaagcgctttcataaaccgatcgtaatccgaacctttcctatactcgccctcttccaggaaatagcaatgcttcttaatccaaccagacttcaacaagatacgtgtatccttattggctgttgtcggtttcgcctggatgatacatttctcattctttgcctttacagccttacggacattgagggcgaacaaacgaccaccgttattgctttcgatacgcatattgtcgcagcgggtgtcaagaatcaaggaaactaactttggttcggtaatctcgacattgtctttcgtaaacaggacatcggtaatgaaatactttgtaccgaatactttggcaatcggtgcacagaaatcatcgtctccttcgtcggccacatcggtagcaccgatcacgccatccggatgtttaccttcgatatctgccaacttgaagcggttcaattctgattttgggaacaacaacccaatagcctcgatcggttcctgcatatactcggcacaccagatggaatcgtccgtttcctctcgcaattcgtgataatactccgttgtatgtacatcctcacaaaaagagcagtcgttctcatccagagctgcgatacggataatctcgtcatactttcccatttcctccatacgaccaagaacgtccgtagccgaccagcgggtaccgatgtcgattgaacaacagtttccctcgatacgagaatcatgtgttccctgcttccaagaccagaccttttcgttattggtgtcagatagtgcatcttccaaactcttatacaagtcgtcggtcatggccaacatagacgcaccgaaaccgattaccgtaccgcctacaccagccccgaagtaactcacctgccgggcagcttccaagctccagccatgcacgttctgtttatcccctcgcaattgcacatccgggaatatctctttgaaccggaaagagcggacaatgtcgcgtgtatcataagatagtttattatacagtgtatcggaacaacagttgcgcatgaccgactcttccggaaaatggccaagcatccacgaaatgaacaaggatgatatataggacttcccggcacgtggcggcatggagacggccagccgacgaatcacacccgacacatacgattcatatacacgagtgaaagcgtccgccaccttcttcaagaacaggcgtttcgagaagaatttcggatcataatacaaacagtatgaccaaaaatcatttttcgccttccggcgtcttagcacatccgctgcttccgccatcaacaacaatatctctcttctgtttttctccatagataaaatcctccaattgctcgtcagtcatcccctcaaacttacttacgggagtaagcccactaatgttagaatcctgcctgtttttccaacggtctggattaccatttgtcaaggtgaaaatgatagcggcggtatccggctggatatgcttcttgactatcgttttctctttgatcttaggtttctgcttctcttttccattctcatcaaccataggcttcccactatcgatatacgtgatcttcgactcctctacctcataaccttgaatcttctttaataaagacttttgggcctcggcaacaaagaattgcatccgtgcatcctccgctttttttacagagtcggaaaagtcggatttcgttttcatccaagtataataagtatccttgtttataccgaccaaatcacagatttcggcaatagtatagctatcctcccgaataagagaacaaatccgatccaccaatttttgactatactttgccattaaatactactcttctttttcttccttactaaatttaaacatagaatccgccatatcaaggcaattctccaattcattcacgatagctttcaactcaatatatttgcgcttatccaccgatgaagaaacaccttcactatttatctgtctctccaactccactaactgcttgcgtttacgctccaatctcttggcaagtacctcacgatatatcatacactgttttattttcatggcgaatatccttttatagtttatcgccaaatttatcaatcttccttaaacaaatcatcatccgagaaatcaagttcaggaaaattttcctttattttgctcagatcccctttatagaatactagcacattttgatgctgcttaccaatcttacggctattactaaactgcttcccggctctcattgccaagctgcctatgttattaaccagtatcatctcattgtaataatgcaagcctgcttcctggaacgctgcgatcgtatcaggaacaaagctccgatacacaccactcttatcgcaaacctctcctactacaaacacggcgaatcgattaggcttcaacagtgaacaactcttccggatgatttctttatacgcttgcaggaactcaggataatccatcgtcgataggtctgccggatcatcactgtacacttctaggtctgcatacggaggacagctaaaaaccaagtctgcctcataaccttctgccagggcatctatctctacactatctccacaaagccacagaggagcgaacttatggccgcctttcccgccgaattcatcccctaatacttcagcagcgtttttacagttggcttcgatctgctccggccttagatcaataccaaaataagtcatatccaacatggatgcaataataccacgaacggagccaccagcaaatgggtccaggatacaaccattgggaatattaaaccaccggtaggccagctcgcacagtaccggatcaaagatcgaggttccatccataaacgggataccatgatcccggcaatacttctgtagttcgttccacgacggatcgacacctgttttttcacgaattacgttacgggcttcgtatactcggggtggttgtgctgatcggttaaacgtaatctccttctcccggccatcgtcactctttataccgagatcaagccaggcacgtttccggtcttgccagtttccaagtttagagtcaagtactgagaaaggaggaataatgaaacgttctttcaagctaccgacgcgtcccttatctggctttacatcgtttactgaaacatcatcaatattcaaatcatcaatgttgaactcccaagcgtccaactcatcggcaccaaaatcttcaacaatcgcgtcaaagtcaaatacagacgtatcagaggtataattgtcagctagggcaagcgccttacgccgagaatcctctgttgagaggtcggtacgcttgatagctatcaattctgtaccatctgattccacaattcgaaccggtaagcccaattctcgcgcttgctcatacacaccattcccagctataatgcaatcattcttatcgaaaaggatagaacgtcccgctccacaatcctccaaacttttacggatcaatctcttgttcttatctgtgtggatacgataattccgagggtcatacttcaattcagccataacttttattctaaacgtaaaagaaaaaggcaaggttaatgataatacagcaaaaatgcagtccactaatcagttaggtgtttagctcataatactgcataagctgaaaaaggaggttcgataaaagttgcgaaagacttcagttcccatatcgttactgatataataggaacaagaaacggtacaacaggttatatttcagtaatttgcacaatttttcatacttggagacaactcgcttgatattaactttgtaacaatcaaaaaagtatgaaaacgagtatgagcagatcgactttcaaaatcctcttctacgtgaagaagggcagcgagagagccaacggctatctccccctgatgtgccgtcttacggtggacggcgaaatcaagcagttcagctgcaagctggacgtacccccgaaactttgggacgtgaaaacggcacgtgccaccggcaagagcgtcgaggcacagaaaatcaatgcggcggttgaccggatacgtgtggacgtgaaccgccgttaccaggaactgatgcagtccgacggctatgtcactgctgccaggctgagggatgtctacctcggactgggcgtgaaacgggagactttgctgaaactcttcgaacagcacaacgaggagttcatcaagaaggtgggacacagccgcgtgcagggaacatacaaccgctaccgtaccatatacaggcacttgtgcgagttcgtcccgaaagtgtaccgacgtgacgacatccccctgaaggaactcaacctgaccttcatcaacaacttcgagtattttctgcgtacggagaagaaatgccgcaccaataccgtatggggttacatgatcgggctcaagcacgtcatctccatcgcccgcaacagcggcgcgctacccttcaaccccttcgccgggtacatcaactccttcgagagcgttgaccggggctacttgacggagcgtgagatacagacgctgatggaggccccggtgaaaagcgggacctgcgagctggtacgtgacctcttcatcttctcggtgttcaccgggctggcctttaccgatgtacagcacttgcgatatgaacacataataaaggatatcaatggcgagtactggataagaaaagcccgggaaaagacggacaacatgcgtgacattccactgttagacattccacggatgattttggagaagtacaagacacatccggaatgcctgaaaaaaggagtggtcttgccggtacccagtaaccagcggatgaacagttatttgaaagagatcgctgacatatgcggtatcaataaaccactgagcacgcatgtggcaaaacattgtatatttcctatgtagttgaatattaaacagttatattctatttatcactaagtaggtaacgatttagaaacgagcaaattacaatattccgttttcctttgcaccagtcaaagaacgattctttcaatgcaaatatacactttattgtctaaaaaaacaatcattttctatttttaattgacttacaatcaaccttaaagagagtatctgatttcacttcctccttttggaagaatgctggcccgctcatataatccggtatttttttaatttctcgtacaaggaggtccggctgataccgagcatcctggccgtacgggcacggttgccctctgcctcttcaagggtcttgagaagcagccgtttttctttctcctcttctgagagagaagcggtttcctcccgtccaacagtgaggtccagattcagcccctccagtgagatccatccgtctgcagagagcaggacagcacgttggatgcagtttttcagttcgcgtatgttgccgggccagggatatttttgtaatgagaccgcagccagactgttgaaaccgcgtatgggcttacggtgcttttcagaaaaatgcttcataaagaactccgccaacggaagtatgtcctccccgcattccgagagagggggggacattgatggtgaactcgttcaggcgatggaacaggtcctcccggaaacgcccttcggatatcgccctctccaggttttcattcgtggcggctaccagacggacatcaaaggcgtattcccgggtagagccgacgggcttgtagcgtctttcctgtagggcacgcaacaggagcatctgtgtctcgggggaaaggttgccgatctcatccaagaacagcgtacccctatcagccgtctggaacagtccgcacctgtcaccgtaggctccggtgaacgtccccttgcggtgcccaaaaaattcagatttggcaagatcgccggtaatggttccgcagtccaccgggacaaaaggcttgttcctacggtggctttgttcatgcagttcgcgggcgatatgctcctttcccgtaccggaggctccccgaatgagcacggaaatgtcggaacgtgccaccagccccactaaccggtacatttcccgcgctttggcactctccccgcggtagaactcactcccgtcattccgagaacggctgaatatctttccgatagcttccagcaacttgtccggctggacgggcttgcacaggtagttggccgcccccagctgcatggcttccaccgcgttctccacctgcccgtagttggtcatgataaggaacggggtggcgtagaacctctcgttcatccattccagcagggaggtgctgttcccgtccggcaggcggagatctgcaaggacaaggtcgaattcccttgcggaaagggccttgcgggcagctgacagcgtcgtagcatgttcggtcgccatccccttcttcttcagccagttgccgatgctgcggctaaaaatcacgtcatcttccaaaataagtatcgttttcattcctgtctctctttccgcatcagttccgcataggatatcagttccctgacggcaccgattattttttctattttcacatattccttatcctcccattggcccgcgtcggatttgaccagcactctcagaaccgccaccggatagtccagacgtaccgtctcccacaacggcaggttcctgtggaggatggaaatgatttcccggctgtccttttctttcacggcggctgacagcctgtcgatgtccttgcggctctcactgacaaacagccccagcatttcctgccggttgtcctctccggcaagcaggagggagaagtccggcctccactctttcccattcccttttatgccccccatgatggcggttaccagcctttctgcagagaaaggtttatggatacatccggcgaaacctgcggagagatattcctcttccctaccggaatgtgccgtgacggctatggccggaatctccctcgcccgggggatgttcgagtccctcagcaattcaaggaccgagaagccgtccgcaccgggcatttgtatgtcggtcagcagaagatcatactcctgccttttcaggcagtccatcagttcccggacatccatgcagcagtcacagtgaatccggctgtgggagagcatctcccgggtgatctccagctggatgcggtcgtcatccatgaccagcacacggatgccgccgggcggttcacagaccggaaacaccttctcttccagaggggcggactgtccggccgagggcacgggaaggaaaacggagaagcggctgccttcaccggggacgctctttacctccacacggccccgcatttcagacacgagccgagccgtgatcgccagccccagtccgaaccctggaatgtcacgcgcgttgtccagcctttcgaacgccccgaatatccgttctttctcttctgcgcttattcccacgccggtatcccggacagagatgcaaagttccccatacaggtattccgcctcaaggcgcacctccccgtggggcgtaaacttcagggcgttggacagcaggttgtcggctatttgccggatatgcgagccgtcacagcagacgatggtgtccagaccggagaaggatacggtgaacattaggttcttctgcctggcggcaagccgatagccgtccgctatttcctcgaacaggactttcaggctgaagagcgtgtcattggaacggaccccgccttcatccatccggtggtattccatcagcgtgtttaccaggccgagcatgtaatcggacgagtgcaggtgttgtccagatagccggtcctgcggctgacgtcgctttccgagggcaacagctccgcgcagcctttgacggccgccagcggggcgcgcaggtcgtgggccaccgaggccatcagttccttgcgtgagcggagcagttcccgattcctcctgtcggactgttcaagcttcctttcgtaccggagacgacggttcaggtcccggtggatgatggtatacagcatgatcgccagcagggagacggacagggcgaggctggctaccatatagtaggagttgtcacgttcaaggacaaaggccttgtagcgtgcggtaaaacgctcgttgttctcccgctcaaattcggagatcatattgttcatcctcccgttcagctccacactgccggtgtacaggctgtccatctgtgccagtagccgggcctgcctttcggcctgttccagggcgaccctctcattcagggagaggagcatgcgtgttgtcgtcccggttggaggggtggcggacaatgactgccgtttacgttcggtctcttccctctgttgcaggtaagcggatttgttttcttttctacggaagatatcccaaatgcttcttttctttttgggagtatcttgctcaccggctcccggagaaaccgtattttccttttgccgcgcagcctgtttccgggctgtcgatacaatggccgggatgctttcctgcacaatgtcacctataccttgcagctcattgaaggtatgcatcgccttggcaagaaggagttccttgttccaaagaaggagacacaacgaatcgatatggcttttctgtaacggggtatggacatattccttcagaagctgcaggctgtcacaaaccccacggcgtttgcggctgtattccctcaggtcgtcatcattccatatgacggcaatctcggcatgggtggagaggtccaatagaccgatgtagctcttttcagccaggcggtgtatcgccaccagctccttctcctccttgcgcagcgtgtgtcttaacatctgctcctgacggaactgatagacgatgaatgccaacagcaggaccaagacggcataaccgaaagatatttttaattttaaccacatgatagcactaattatgaatcttactcacgagtagaatactcgtttcatataatatccatatcggaagactcacgagcgaaagcgtaaatacatctgaagtcggcgtaataatagctgccaccacaagaataaccacgatggcgtgtttgcggtatttgcgcataaaatcggccgacaggaatcccagtttggcgaacagccacgatagaattggtatctcaaaaacaagccccattgccaacgacatggtcatcagcgtggaaatgtaggattgcaaggcaatcatgttttccacttcaccgctgacctgataggttcccaagaaacggaacgtcagcgggaaaatcagaaagtagctgaccgccacacccaaggcgaacatagcatagccgcctccgaccacctgcaccacatatttccgctcattaacatataaagcaggcgatacgaagcgaaacaactggtagaggatgtatggcgatgcacagagaacacctgcacatagtgcggctttcatgtggatgatgaactgcccagccagtcccgtgttgatgagcttcacgagaaaatccggcgcaccggattccgtcaccagaccgccgagcgaatagagcaggcggtaggtaatgaagtctgcatctttgggcgcgaggatgactgcgaacagctcttctttgaagcagaatgctgccacgccgaacacgacggccacgagcaggctcttaacgatagccgcccgcagcacgtcgagatgttcccagaaagattgtttgtccgtatcagccgccatccgcttattcttttttcaccggttcctcctcgatctctttctccatattgttcatcccttccttgaacgaacgtactcccttgccgagacctttcatcagttcgggaatcttcttgccaccgaagaacagcagcacgaccaatgcgatcagtagcatttcctgcatacccagaccgccgataaataagggcgttatcatattggttttgttttaattcgatatatctgctctataaccaacgtattgcatcgttacatgaatccgtagcatgactacccgaaacatttacgtcctaattcgtaagcctgtcgactgtattccgtgtcattcaccgcacccgtcggccacattccctccgccacgaccgttccacagtctttccatcctaaataccggagcagcgtatggtaatgcgagagcatcggctcggcttcttccgcagctgtatcagcgtatgccatcagcaaggccgaccgtttctcgcttcccttgacctgcccgttgagcgcatagaagcggtctatcacggctttgagctgcgaagagaatccgaagtaatacattggcgtggcgaataccaccatatcggcggtcacaaggtgcggacgaagctgcccaaaatcgtcgttgaatatacactgaccgttcattccgcaacggttgcaggcgatgcaggaagaaaccttgtgctgggcgcaatcgaaatggtacacctcgtgtccggcttcttccgcacccttgatgaattgtccggccaaatgattggtattcccgttccggcgcggacttcctgtcaatactactattttcattttcttatccgttttatcgttcaacaattcggctgccttcgctatcccgactccggaaagcagggttgctccggctgctgcaccgacagtctttatgaattttcttctgtccgtatcagttcaacttttttcatttaaccactttgatagatggtctgccacttctgatattattcaagtcaggcaacaggaaatgcgtgtgacgcatagttctgtttccgccaactgataccccgatacgatttatcggttaccacgggaaattatccgggtcgttctgttcatacgcacgttggttgcggttcagaccggtaataatctccatttcggaaggcgaaagctcgaagtcgaagatacggatattctcgtccgtgtacgcatcgttgtcgcagcggggaatggtgaccagcccgcgctgcatgtgccaacgcaggataacctgtgcggcagatttaccgtgccgggcggcaatctcgccgattgcagggtcatcgagcacgccggtaacgccctgtcccaacggtccccatgcttccacctgaatacccttgcggaacgtatagcccacgacatcgtgctgggtcatgtacggctcgatctcgatttgattgacgacgggacgtatgcgtgcatactccagcaactcgtcgagatggtgcgggttgaagttgctcacgccgatactgcggattttccccttgtccacgtattcctccaatatctgccaagtctccttgatatgtccttttacgggccagtggatgagtacgaggtcgatgtagtccgttccgaggtcggcaagacttttgtcaagcgactgccgcacggtgccgcctcgcatttccgtagtgttcactttcgtggtaatgaacagctctcggcggtctattccgctccggcgtatgccttcgcccacctctttctcgtttccgtagccctgtgccgtgtcgatcaggcggaacccgaccttgattgcatggcatactctttctgcggcatcatccttgaccaagaacgtgccgactcccaattgcggcatttccatgccgttgttcagttttacagttggtactttattcatttcctgtgcgtttgtttgaattgccatcccccatacaaaggcaatggcaaggattgttttcaatctgtttctcattctatttattgtttatcacatcgccgtatatcctccgtccatcgcccaagtctgtccgatggcaaagccggcatagtcgctgcaaaggagcagcaccatcgaagcgatttcttctgccttgccgacacgccccaacgggatggcgtcgatgacacgtgccatgtggtcgggcgactgctcgatggcctgacgtaccatcggtgtctcgcaggtgccggggcagatagcgttgatgcggattccctgccgggcatactccaacgccgccgatttggtcagtcccagtacaccgtgcttcgaggcgttgtaagccccgatgcaggggatgcctaccagaccaccctgcgacgagcagttcacaatggctcccttgccgtgctttttcatctcgacaagttcgtacttcatacagttccacacgccacgcagattgaccgaaattacccggtcgaaatcccagccttcggtttccgccagatcttcccgcacggcggcatgtatgcccacgttattataggctatatccaacttgccgaaaacagcgaccgccttttcgacagccgctttcacttgtgcctcgtccgatacgtcgcacctgataccgatggcgttgtgtccttccgcttccagttccttggcacggtctgttacccgactatccaaatcggccatgacaaccgacgcaccggcttcggcaaacatccgtgcggcggcataaccgataccgccagccgcacccgtaataaatgccactttattttcaaaacgtatttccatagtgaatcaaagtttttccgtatcagacatatcacgggtaatactcacgctttgacggacatagagcgtgtcatcatgtataagacgaacggcaagcccgacaacggaggggatggtcgaaacatatcctttcgcttgttcgcctttgaaagtcaatgtgaaatcatccttatccccgtcccgtaaataccccggacgaagtaccgtgtaatccagaccgctgttttccacaatatccgccgctttgcggtttggtatttggtcgggattgtttctaacattgtcttcatcgtccatgtccgccggaatctcatcgtagattcccacggctcccataaagataatacggcgtaaaccggctttcttcatggctgataccgttttttcagcgataacgggcaaatcgtcgcccgatatggcgcaatacaccacatggcaacccgccatcgcctgctgcaaatcatccgctttcatggcgtcacaatcgacgacatggcatcgctcactttcgtggtagcaagccgaggcatgacgggatgcaagcgtcagatgacactcttcgtcattgctcagcttctcgacaagagctttcccgaatgtcccggatgctcctaaaatcagaattcttttcatgcttgaattattttagttttaaccagttgtttccgaatgaagtctgttcggtctccgcatgaccgcgtatgccatataccggcaatctgtcgagttcggaatccagcctgtcgaactcttcatctgtcagttgcatttcgcacgcccgcagattctccatgatgcgctctttgttcttcgagccgggaataggcacgacattcgtatatttacggagcatccaagccaaagagacctgcgctggagtcgcctgcttttctgcggcaaaactcctgagcatttcgacaatgggcatattgccggttatgttctcccgcttcagttgtggaacccatacacgcacgtcatcgacctgaccgaactccgtatccggtgtaatttttccggataaaagtccgctggcgacaggtgagaacggcacaaaagcaatcccgtttcccacgcaaaaaggaatgacatctttttcagaagtgcgctccaccatagagtagatattctgcacggcacctacgggcgttacggcatgcgccgcttcaagttgagccttgtccaccgccgaaatgccccattcgcggacaagtccctcctgaatgagcctgcccatcgtatgggcgacctccagatagtccacctccatgttgatgcggtgcagatagtacaagtccacgtaatcggtctgcaaattctttaacgagcgttcaaggtggcggcggatggcagcataaacggagccgcaatcttcaaccgcctcaggccggatatgcagttttgtggcaatcacaacctcattgcgaaagcctctgaccgcacgcccgacaatctcctcgttatgtccgggataataaagctccttcccgtatccttctgccgtatcgaaaaaattgcatccatagccgaacgcttcccgaatggcttcttcggcatatcctgcgcccggtacttggccgtatccgtgggagaatcccatacagcccatgcctatttcactgacgcttaaactgcgaatctttcttcttttcatagcttgcagttatctacccagttgcgaatgcttttctcatcggcacgattaagcaggcgtccctctctccagttcagcgcgggataggttttcttcaacgccgccgcgctgcccgcgagcgtgctgcctccggatgtggcgaacgggatgactgttttgcccttcaggtcgtggctttcgatgaacgtattgataatgcgcggcgcgaggtcccaccagatgggataaccgatgaagatgacatcgtaatcggcgatgttttcctttctgcctttgattgccggacgcgatttagggtcgttcatctctaccgaactgcgcgaccgcttgtcattccagtcgaggtcggcactcgtatagggttgtgcagacacaatcgcataaagctctccgcccgtaacattcgccagtttttcggccgctcgtgccgtcgttcccgtcgccgagaaataggctaccaatattttatggtttgatcctcctttgttcatatcctgtctttgttgtgcgccggtggcggtagccatgccgaccaccgacagcaatatcaataaaaatctatacatgcggctgattatttaagtttgtcatactcttcgtcggtaacgggttccagccattcattggaagcgttttcgcctgcaatctcgaacgccagatgcgcgaaccagctgtcggctgccgcaccatgccagtgctttacattggccggaatgtgaatgaccgttccgggcaaaatctctatcgccggtttgccctcttcctgataccagccgcgcccggccacaccgataagcatctgtccgccgcctttcgtggctttatggatgtgccagttgttgcggcagcgaggctcgaaagtcacgttggaaatattcacctgctcacgcgaaaccggtgcgaggtaactgttgccggtgaaatattgggcatacgccgtgttgggttcaccgatggggaaaatcatttcgcgttggaatgcagcttttgcatcctctccggtcgtctcttccgcccatacctctttcgccagacggaatgccgcccatgccttcggccaacccgcgtaaaaaccgatatgcgtgataatttcggcgatttcggtgcgggtgataccgttgttcttcgccgactgcaaatgatatgtcagcgagttgtctgtgataccttgactgatgagcgaggtaatcgtcaccaagctgcggtcgcgaagaccgagcttgtcggtgcggctccatacctcgccgaaaaggacgtcgtcgttgagttctgcgaatttcggggcgaacccgcctaactgatcgcgccctgctgtctgtactatcttttcctgtgccataacatggattgttaaaaggatgaatactgaaattaaaataattcggttcatgattctttactgaatgaagttattgattttgttcgcagggttgagcggcgtctggtcagccagcactaatgacttgaccatgtgcagcgttccctgcttgtatttctgaaagtgttccgaagcgatgtgcttctcgtatgcttcacggcttgcgtatgtttcaagaattgttaccttgcagggattctccttttcgctgacagcgtacatcgttaatacacctggttcggtacgcagggagacttcgcccacctcggttgcgtatttcatatattcgtcgagatattgcgggtaaacttctattttcgacaggcgcacgataccgtcggcggtcatcggctccttagcgcacattcccggctgcttgtccaagttcaggcatttgccgataatctctccggtggccatgtaggaataggtcggaaactcgaacagcacgggtttcaaccgtgtataatcgagtttcccgttgccgtcaagcacttcgggtgcagcgtaagtgttagcgacggagcagatgaagttgtcgaagccttcggtttcgtagatgtccactacgtcgcactccatcgtcagcggcgaggcgtcgattacgggcgtgccgttctctccccaatgatagtcgaatacgttcgatttatcgaccgatgcgccgctcacgctgcccacatagtcagctttcggcagcatttcacgactgacaaggttgatggagagcttcttcgacttccttatcccttgattggtatgatggtttttgctcatgctcacgagaatccggtcgtggccgatgatgcccgtatgccctacaacgagccagttcactttgccctcaacctccgcaccgacaacggtcatcggtttgggatagagggcaagcaggtttccgatattcttcttttccatttccgtactgttttgtttgtttccctcctttgccggttgcgtattgcacgataacaaaagggagagaaacaagatgattcctattgattttctcatcctcaaaatggtattaaaggctttgacgcaacacttcgatcacatcctcacgggtaaggacaacgtagccgctttcgttgatggggcacgcatcggccattccttcgagctgcgacgcatcggcaccgcaagccgtgatgtccatcgccagtcccagttcccgcatccatgcctccatccgtgcgagtccttccaacgcgatttccttgtccgtctttccggtcgggacaatatcccacacggcggtcgccagctggcggaatttcttcaccgcctcttcggaacgcccgatgagcaggcggtagtaagccccgctgacagccgagagcgtatgcccgtgggtagcgtcggtataggcggctacgacctgtcccagcatgtgaaccatccagtcggtgaaggtgtgtcgtaatacccgatgcgccttcttttttttcgttgactataaaaatcggctcatttttttaagctgcgacattttgaggatttcttcgatttatgtgttcccagcatctaaaaacagcagctgtaagctcataatacagtctaatcaaccaatccataccttctttagccatttttgcacatatcttttttatattgaaggcaatggcaaagaaggcaaaatccatgaagaccttatcctttccaaaatggcggaaacgtttgtaattcatattgtttttaatttgtccgaacacggattccggttctatgcatctctgtcctctgtgtttcagcccttcctcggagcagagctgctctttggctttttgcctgtattttctgagcctgtgattcagttctatcgtcctgtttccttttgctttaaaacaacggcatcttagcggacagccttcacatctgacggctctgtacctggcattttcgctgacatatccggatgtggttttcacatgtctagtacctatcctccgcatcctttgtcccatagggcagatgcaaaagttatgttcttcattgtagtagaagttttctgccttgaacggatccggttggaatctcggccgctgctccatgtggaaatagttgtatttgacgtaagcttccatgccgttctctgacatgaagcggtaattctcctcagaaccatagccggaatcggcaaccaccgtatgagccatccggtcatacctgtttgaaaaagattgcaggaaagggatcatggtcagtgtatccgtagggttcgggaagagtgcaaaatcggtgatgaactggttctcggtgccgatctgaaggttgtaaccgggcttcgtctgcccgttacgcatggcatcctccttcattctcatgaaagttgcgtccttgtccgtcttggaataggaattcctctcttgcagcgtgtccagatgactgtcgtattcctggagtttgtccctatgttcttccagctccttcagctgtttgcgtctctttttcagctcagtcttttcctccttggtggaaggctcgggaacctgttccagcacatgacgtaattctcccgccatttcggtcagcatggccggagtgaactcaacctcctcattactttccgaatacttttcttgggcgatgacatcgtctatctgccctagcaggacatgtatcttcttcatcaggcgctctcggttccgctcaaccgtttttcgccaaacgaaagtatacttgttggctttggattcaatctttgtcccgtcaatgtattccacgttcaaactgataaatcctttggaagagagaaggagtacggtttgggtaaacacctcgttgatttccttcttcacccgattgcggaaacggttgatggtaatgaaatccggtttctcatatccggcaagccagatataatgaatgtcacgatgaaggagcttttcgattttccggcaggagtagacgttgttcatgtaggcatacagaatgaccttgagcatcatcttgggatggtaagggctgcggccgcattccttatatagcttcctgaaactttcaagattcaggccctcaaccagggcgtcaaccatgcgcaccggatcgttatctgcaatatcctcatctattctttgaggaaaaagcactgtttggttgggattgtaaggacgaaaatgtatctttgccatagtataaattcttatgcctaaagatacaaaatcttcaggttataacaaagccccaacttgtgaaagtcggggctttgggcataaaaaagaaggtgagaattttgacacaccttcttgttttattcctttacggcaatcacttcgatttccaccaggccattcttcggcaatgtcttgactgcgacagcagaacgggccgggaaagtaccttcgaactgagaagcatatacttcgttcatagcagcgaaatcactcatatcggccaggaatacggttgtctttacgacatcgttgatgctaaggccggcttcttccagaattgcatgtacattcttgaatgcctgtacggtctgttctttcactcctccttctgcgaaattgcctgttgcggggtcaagacccaactggccggaagcaaacagcatatttcctacttgtacagcctgactgtacggaccgatagcggcaggtgcgttttttgttgcgataactttcttcattgtttctttattttaataacgttattgtgccttgttcattcatccgctggcgaaccacttcatagatcaggatggaagaggcgaccgatacgttcagcgaaccgatcgtaccgaactgcggaatcttcaccatgctgtcgcagatacgaagattatccatcgaaactcccgtatcttcggctcccattacgatagccacaggtccgtcatatttaatagccgtataattctcaaaagctttttcactagcagcatagacttttactccggacgcctgtaagaaacggatggcctccgtaatacttttttccttgcaaacaggcaatacatggagcgcaccggccgaggtcttaatcgcatcggcattcaccgttacgcttccccttgaaggaatcacgatcgcatccacacccgcacattcgcaggtacgggcaatcgcaccgaagttacggacatccgtaaccccatccaacaacacgataaacggattctttccctgctcatacacaaacggaataatattctccagccgctcgtatgtgatagccgggataaaagcgattactccctgatgattcttacgtgtcaaacggtcgagacgttcggcaggcacacgctgtacaggtatatcacgtcctttcagaacttcaaacaattcacgagacaagtctccctgcagttcacgtttcaccaatattttatcaatctccttatcggcctggattgcctcgatcacggcacggatgccgaacaccatttcgttttctttcattattctatatcttttccgttttcatcaccggactatttcgatttttcccggctttatgcggacaaagatacaaaagatttacgcttttattatatactctcgtatatattagctattgcttttcagcttatgccgtgacgatgaataagcccggatcaagaataaaataccagtaataatcaaagcagatgaaagtccggtataaaataccgaaataaaggagttgggaagcaattggaaatgacggatcgtaacaccgaaagtaatcataaagatcatcacgatccagcctttcacatcaaaaaatgaaaaaggacagttcttttcccctttctgggaaatccgctcggaatgtttaacaaacaaacggcgaaagacaaactggaagaaaagcaggaaaacaacaattgcctctccaactttaaacagccagtaatgggcatcgttcaaccacgtgatgatgccgatccttaagatattgatgccagctatgatccaaacgcatccggctattaaaagcagggtgcgccggtttactctaaattccattatcagatacttttctctatgctccgcctgtcactcgtacgttggcggctattcgtgcgatccttgtcagaccgtttgtccctatcgtaatgcctgtctttatcccgatccggacgtttcttgtcaaatttgtccttatcgtgcttattcttgtgatgatcggaaccgggacggcctccctgatggctcggacgatcgtatttgccgggcttccactgcccattgtcatgatgtggacggccattgttatgatgtggttgaggacgatcatatttaccgggataccatttgccgtcgtcgaaacggtcaaaccatctattgttcgtatattcccattggcaatgccaataatgatcttcataacgatagcacgcattggacggacggtagtgcggataatgcggattattgtaccaacctctccagtcatgaatgcgtgtcggtgcctcacggacgaaacgcacatacaaacgaaactgcgaaggcgaaaggatacgctgtaatttccggtcccgttccatacgcaacttatatatcttccgggcagactgatcccaatagcgataatgcttgcgtgcttcacgctcgatcttctctccgtaccgatgaatgatcttatgatactcggcagcttgacggttcgtcatgcggattgcctgttccatccagaggcagttctggcaatggggttcattccatccgaaactgatccaaaattgtgcatgtccctgcaagctgcaaaaaaggatcgctattaatagaatactcaatttcttcatgtctctcaattttaaattagcacttacattctgttgctattatgaccggatcgcgatgaaaaggtttaaatctttgatttcaacagctctttcgcatttgcaatagaagcactggtcaacgaagcaccgctcagcatacgcgcaatctcttttacacgctcttctttattcattttcctgatacgggttacggtcctttcatccgtatcctccttataaacaaaataatggtctttcccttttgctgcgatctgggggagatgggtaatggcaaaaacctgcatcttcgtacctagttcctgcatgatatcccccattttatcggctatatccccggaaacccccgtatccacttcatcaaagataatggcaggcaacgccgtaaatccggcaatcatcgccttgatacataacatcaggcgggagatttcgcctccggatgccgtctgggccaccggttgcagttccgcactcttattggcggaaaacataaaccggatttcatccattccatcgctttccggttcctgtttaggtacgaaatcgatcgcaaatcgcatattcggcatgcctaacgggacaaccatttctaccaattgggaagcgatggctttcgaggcgatcttacgctgctcgctcaatacggctgcctgttgaagcagttcctggtgagagacttccaactgctttttcaacgattcgatctgttcatcaaaagaatcgatctccttcagctgcttattatatttatccagcaactccatcagctcttcgactttggaaacccggtgtttctgttccaaggtgtataacgtattaagacgttcgttcacccaatccaagcgctcaggattaaattctatgtcctccttcaggacttccgtttcggaagccaggtcgttcatatcgatataggcagaacgcagacgctcggctatttctttcgctttcggataataacgttccagactgtctgcggtggaaagggcctcttttatcagttggacagctccttgttcctccccgtccagcaatcgggttatcttataaagagaaccttttatctcttcggcatgggaaagggtttccagctcctgttccagttcttcctgttcaccggcaaccaaaccggcatcggccaactgctccaactgaaaacgtacatagtcttcctcctgcttggtctggagagccttttcggtcaactctttcagttcctttttcagagacaggtatcggctgtattcctttcggtaaagaatcagcaggatatcgttttcggccattacatcgattactttcagctgaaaccgattatctcccaacaaaagattctggtgctgcgaatggatatcgatcagccggcttcccaattccttcactacagaaagcgggacaggcgaatcgtttacgaaagcacgggatttacctgatgcaaacaattcccggcgaagaatgcaaatctccgcatcatactccaagtcattcgtaagaaaaaattcttccaatttatatcgggagacatcaaagactgcttctatcacacacttttcagaaccgttcttaatactctttccatccgcacgctgtcccaagaccagggatagggcccccaatataatagactttcctgcacccgtctcgccggttatcacagaaaaacctttatcaaacttaatgtccaagctgtctatcagaacaaagttacgtataaataaagacttcagcatagctattccagattactttttaagcgattccatacgcgtcgtgagagcaggatacagattggacaacattttataaccttcctgcttttcctgcgtagttgctttcgaatagatcaaaacgacttcatccagtttggaatcagcgaacatctgaagcaacggagatgtcggccgagcacttttcacctgttccagaaccgggagcagaccgattatagtcgtacgtccacgatccggatttgcagccatttcatcgagccccttacgatgataattataccacatgtcccggaacagttccgaagtattgtccgtcagagccgttgccaaagcatggcggttacgatcgttttcaaaagctttccatcctgtccatgtaggttgcgcctgtgccaggctcacaatctgcatggcctgttcgaggaaagcagtgccacctttcggagaaaaactgtcgaaatccagtccgaggatcgtatagatataaaaaacaaccgttgcaatcagattgctgttcaatgtattttccgtatattccaacggttcgaattcggtatagtcgaaagagagttccgtatcacgataattcagcaacgtagtcgtatagctggaattatataccggacggcgggcctgcacttgtatctcgcctttaaaactattgtccgataccatttcgttgatgatgagagtcatggaacagtcgatacgttcgttcatggcaaaagtagcatccgtccactttttgttattgacgaaatcattcaatgcatcctgcaaggttttgaatacctgtttattcgtactctgtaccttatcactgtttatagtgatgcgggcattcagctcctgcgccttacctataaagggagcagctcccaacaagcatatgcataacaatttcttaatcattctcattttaataatgttgccaatttatttacaatatcaacggccacctcctgtttgctcttcaacggataagcaatcgtcccgccttccttgtcgatgatcgtgatcttattcgtgtcgcaacggaaaccggcacctgcatcctttaaagaattcaacacgataaaatcgaggtttttccgcttcatctttccttccgcatgggccatttcattatttgtttccaatgcgaaacctgccaagatctggttttcacgcttgatcgcccctaacgaagctgcgatgtccttattcggaaccagacggagcgacatttctcctttcgtttccctcttgatcttttcgcttgcctgctcatccgggcgataatccgccacagcggcacaaagaataccagcatccgcctccggaaaagcagttatggccgcctgatacatctcttcggccgactcgacatcgatccgtttgatattcggatgaactaccgtcaaagacaccggtcctgcgatcaatgtcacttccgctccctgctccgcacacgcttccgccaatgcaaaccccatctttccagaagaatagttacctataaaacgcacaggatctatcttttcatatgtcggaccggctgttattacaatcttttttttttcaagccgggtttgggaagcgaagaaatcttccaggaccgccacaatcttatcaggttcttccatacgccccttacccaccagatggctggcaagttccccttcggcaggttcgataatacggttgccgaacaaacggagccggtctaagttctgccttgtggaaggatgtgcgaacatatccaaatccatcgccggagcgacaaaaaccggagctttgcatgacaagtatgtcgtgaccaacatattgtcagcaatgccattcgccatctttccgatcgtcgaagcagtagccggtgctaccagcatggcatcagcccagagaccaagatcgacatggctgttccacgtgccgtcgcgattcgagaaaaactcgctgatcaccggatggctgctcaacgtggataatgtaagcggcgtaatgaattcctttcccgcaggggtaatgataacttgcacctccgcccctttcttcacgagggcacggataatataggcagctttataggcagcgatgctccctgttatccccaatatgatatgtttacctttcagcattttattcgatatgtagtacccctcttttaaaacataggtgttttgattttaaaacataggtgttttgaaaacgaaacatatatgttttgaaagagaagttccttgttccatgttttattacaaacgtaacgccattatctcacgcgctacacggctatctatattgtgatgttcacccaatttccacccctgtttgtccacaggagcggcaagggcatccaaatccttttctgcaatgccacattcaccgaggcgcgttttcagtcccatccggcagaagaaatcctcgcaggcgacgattgccttacgcgccctttcctcttccgttccatccgtaataccaaaaactacttcccccatacgagccagtttgacctgcttctccttaaacatataagtcatgacacccggcaagagaatcgccaatgtttgtgcatgatccaggccgaactgcgccgttagcgcgtaccccatgcggtgggaagaccagtcctgcggaaccccctgcccgatccagacattcaacgcattggttgccgcccacatcaggttggcacggatatcataatcgttcggattatccaagaccttcaacccctcttcatgaatgacacgcatcagtccttccgagaaggcatcctgcacttttgcattgaccggataagtcaaatactgctccactacatgaataaaagagtcgaccaccccgtttgccacctgacgcgcagggagcgaataggtcacttccgggtccagtacagagaatttcgggaataccagcggactggcgaaattcagtttctcacaagtcgatatacgggagatgaccgaacgttcgttcatctccgaaccggtcgcggccaatgtaagcaccgtacccaaaggcagggcattctttatctcgccacctttcgaaagaatatcccacggatcgccttcgaaaccgacagacaccgcgatgaacttcgtagcgtcgatcaccgaacctccgcctacagccaacaaaaaatcgatcttcttctctttgacgacctccacggccttcatgcaggtctcgtaatgcggatttgcttcgattcccggaaactcggtcacttcaaatccttccaacgccttcgtcacctggccgtagatgccgtttttctttatgctaccgccgccatacaccatcagcactttacttccttccggaatcaaagcggacaaacgggctatggaacctttgccgaaaacaacctttacagggttacaaaactcaaaattattcatggtccttatttcgaattaaaacctctcaattttatctcagtcagtattttcttggtgttcagagggaagtcgccattcattatccaggaataatatccgggatcgttcttcagcacttcctctaccagacggcctttatatttaccgaagtttatcacttcttcccccttgtcgttatataccatacgtccggcaaagtccacattattcgtatagctcgaatattgggaaaggaaattaatgtcattctgcaactccggataccggtccaactgcgctttcaacacttcataagtcgccatcgtatcggcctccgccgtatgggcgttttcaaggctcttgtcacagtagaacttataagcggccgcaagcgtacgctgttccatcttatgaaaaatggtctgtacgtctacaaacttgcgtttgttcaaatcgatatcgacacctgcacgcagaaattcttctgccaacaaagggatatcaaagcgattggaattatatcctgccaaatcacacccctctatctgggctgccaacgatttggctatttctttaaaggtaggacagtcttttacgtcttcgtcggtgatgccgtgaatagcggtcgactctggtggaatgggcatttccggattgatccgtctcgttttagattcttcttttccattcgggtaaaccttgacaaaagagatttccacgatacggtctttgacaatattaatacccgtcgtctccaagtcgaagaagactaacggatttttcaggtttaactgcatttcttatattttaatcattcaacatcataggcatcagcagcatcagcaaatcctcgttttcttcattttcagaaggaacgatcagaccggcacgcgaaggatcagccaattcgagtatcacctcttccgaattgatgttgctcagtatttcaatcagataagttgccttgaaaccgatgcttaattcggttccgtcaaaactgcaaacaattttctcttctgcggaagtagaaaaatcgatgtcctgtgcggaaacaagcatttcgttctccttcagctgcaacttgacaagactgctggccggattggagaaaacggaaacacgcttcaaggcattcaggaaagagatacggtcgattgtcaccttgaaaggattttcctgcggaatcacactgttgtaattcggataacgaccttcgatcaggcggcataccatttcgaaattagcacagttgatataagcattgttatcatcaaacttgatgctgaccatctctccttcctttgataaaaggcctttcaacaggttcgcgggcttcttcggcaagatgaaagaagctctttccggtgattttaccgaaagattgcgcagacgcaccaacttatgaccgtcggaagccacgaatgtcaaatcgtccgtgtgaatatcgaaatagataccgttcattaccggacggagctcgtcgtcagccgttgcaaacaacgaacggctgataccgttcaacaacatctgcgcgtccatcatgatagagattgcattctcattcagaggtttctgctgcggatatgtatctcccttctgtccgataaaattatatttaccattctggaaatggataaagatttccaggttatcgtcgttaatatcaaaagtcagcggctgttcgggcaactccttcaacgggtcgagcaagatttttgccgaaaccgcgaaaagtccgcttccttgtgcattcatcacgtcaacggatgtaaccagacgtgtttcagcatccgaagctgttatagtaagtttattaccttccaggttgaaaaggaaactgtccaggatcggtaatgaattcttagaagcaataactttgctaatagattgcaaacgtgataacagcgctgtgctggatacatcaaatctcatggttcttaattattaatttatttctatttattatttatcaacgtgttgtaggttcgattcacagactgctcccaatcggacagctgcagatttgcccacacaaaagtatgaaaatattccatataaccacccgaatgaagacaaaaaaagaggtccttcccactatggaaaaggacctctcttcgtatcttgatattacgctccgttatttagcgaaataatctttaacagcttcgttaggaatcatttcttcctggaagatgtaagcaccagtcttcggggacttaaccatcttgattactttagagtaggtacgaccgtcacctttcttaaatgttgcaaccgctttttttgccattgtttaatctcctcttacttaatttctttgtgtaacgtcatcttcttcaggataggattgtacttcatcagctccaatctctgagttgtattctttctgttctttgttgtaatataacgagatgtacccggcataccactgtctttgtgctcggtgcattcaagaatcacctgaactctgttaccttttgctttctttgccatttcttatttcctcctcaaattaagcgtttaaataacctttttcagcagctttcttaattgctgcatccaaaccaagtttattgatagtacgcaagccagcggctgaaatattcaggctaacccaacaatcctgttctacccagtagaactttttagtaaacaggttcacatcaaacttacgtttcgttcttctcttagagtgagaaacgttgttgccaaccattgctttttttccggtaatttgacaaattttcgacattgctaattttactttttaatattacgaaattaagtcaactcctgctatgtgtcttccctttttgaactgcatcacgaacaaaaacaaagattctaatagagtttctcttcttttacggggcacaaaggtacaaattattttgattcacacacaagaaatctacaaataaatcaacactttctgctatttttccttaatttattctgtataaaggcatcaagacccgctgccgcatagattgttatcgcaaacaaataaggataatgataacgggaagtgatcacgaacaaaaccgttactgctgtgcctaaaacagggatcagaagatagatattccgctctcgtaacagatcgcgccggttcgtccaaacgtaataaaagaatagtaaaagcaccgtgtaatagacaatgcttttcaacgccagggaaacgattaactccatcatcttcatattattaccctccacctttgaaagaactactctaaatcccatatccggctttacacgctccgtccaggtatcttcacaatacaaagcagccaacttgaagggcagttgggaaacatacttaaacggatgctccgatatccagcggactgacgcacgcttcagcaggctgtcccgctccatgtaggtataatctccgggaggaaggcaaatataattgtccggatcatcgaagccgttaaaattgactaaaccgtttgcttcatcaaaagaactcatcgctaagttatagcctccggacaccgcttgatagacaaaatggccggttctctccttcgcacttcgcccgatcaggaaaacagtcaagacaagcggcaaggccaatgctgcataagactgccaccggcgcttttgcacgatgaaaaggagcaaaatcacgaataaaaagacaattgccagaggacggaaccagttagccacagcgatcagcacgccggcgacagccacaggaaacagccggcgaacgttgcatagcagcagggctgtcaatagtaggaaagtaaaaggcaaatcagtcaatacagctatcggagcatataggttcgaaaaaatcaacatatataaaatagcagcgtaatatcccgttttattcgaaaacatccgtccggccaacttccgtatttcaaataccattgcaatattcattaataaattcagcaaccggacaaaggagaaagatccgcaaagatgatagatcccgatcaaaaggtttacataccccggaccgaaaataaaatcctcatattgattatgcacgtccggataccaagtgcccctcgcgatgcattccgaagccagtttcacataagcttgggcatcatcgtggttgggcatatcccagtattttattaccaggcaaacctgtaggatcacccatatgacaaacatgatccgaaaaacgaccggtatttttttccctatcatttctttagctcttttggggagacaaagatacagccttttcaccggtaatccgcccgtgataaattaattctatctgtacattcgagaaacaacgggacgtatttgcaacaaaatcaaactcgggatggtttcatttttaaagaaacataaaataaaaacgcatttaatatgacacgagattttaaagaagcattgagacaccgcagaacttattaccacatcacgaacagttctccgatatcagacgaacagatcaaagaaatcatagacttcgcagtcatgaacgtcccttctgccttcaactcgcaatctacccgcatcgtattgctgttaggcaagaatcataaaaagctttgggagataacgaaagagacattgaagagacttgtttcagcggaagtcttcaaagggacggaagctaaaatagacggaagtctggctgccggctacggaacgatcctgttcttcgaagacaaagcggtagttgaacagctgcaagactccttccctacttattacgacaaatttccggtttgggcacagcaaacatctgccatgcaccagctggcgatctggacaatgttggaagatgccggcttaggcgtgtcccttcaacattataatccgctgatcgacgaaacggtatatgcggaatggaaactcgacccgaaatgggaactggtggcacagatgcctttcggaacgccgacggaaggacccggaccgaaagagatcaaaccgttagacaaaagagtcctggttttcaagtaaaagagcacaagcatgaattacgatattgcaatcataggaggaggaccggccggctataccgcagccgaacgggcagccgaaggaggcctgaaaaccgtcctctttgaaaagaacgccattggaggcgtctgcctgaacgaaggctgtattcccacaaaaacgttattatactccgccaagatattggacagtttcaaaacatcctccaaatatggcatttcaccggaaggaacaccgtctttcgacatggacaagatcatcaggcggaagaaccggactgtcaaaaagctaacatccggtgtgaagatgcggctcacttcaagtgggatcacgattgtcgaagggacagccgttttgaacggggaaacggatggaatgatccgtatacaatgcggaaacgaccttttcaccgtcaaaaacgtcctcctctgtaccggctccgaaacggtaattcctccaatcaagggactttcggatacagattactggacttcgcgggaagcgctcgacagcaaagaacttcccaaagaacttgccatcataggcggcggtgtcatcgggatcgagtttgcttcattctttaccagcatgggagtaaaagtaaaggtgatcgagatgatgccggaaatactcggcgcgatggacaaagaggcttccgccatgctccggagcgaatacgccaagaaaggggtggaatttcatctgaacacaaaagtgaccgaagtcaacccgaaagaggtcattgtcgaaaaagacggcaagacgaatgcgatctccacagacaaaatcctggtcagcgtaggccgccgggcaattaccaaaaatttaggtctggaaagcctttccatcgagacggaccgccggggcgtccgagtgaacgaatatatgcagacctcccatccacacgtttatgcagccggagatatcacaggattctcgcaactggcccatacggcctatcgggaaggtgaggttgctgtcaaccatatcctggggaatgaggaacggatggactacagggctattcccgccgtcgtctacaccaatccggaagtggccggtgtcggcaagacggaagaggaattgaaggcaagtggagaatattacaaccttgtcaagataccgatgacctattccggccgatttgtcgccgaaaacgaaaccggcaacgggctatgcaagctcctgacaaacgtgaacggccagatcatcggttgccatctggtgggaaatccggcatcggagatcatcgtcattgccggtatcgccgtcgagcacggttatacggtcgatgaattcaagaaaaccgtatttccccatccgactgtcggagaggtgatacatgaaagtctctacctctgataatgctttatatcaacaatccatacacggatgcctggttcaacctggcagccgaggagtatctgctcaagaacttttcggacgacatcttcatgttgtggcagaacgaaccgtccgtcatcatcggtaagcaccagaacgtatgggacgagataaaccgaaactatattcagaagaagcatatcaaagtcgtacgccgttattccggtggcggagccgtctatcacgattccggcaacctgaatatcacttttatacaaaacagcaaggaactcgcatccggcatattcacagcccggctgatcgccttccttgccacattcggcatccgggcagaggctgacgagcggcaggcactcacgatcgacgggttgaaaatatcgggcagtgcgcaatccatccacaaagggaggatcttgcaccacgccaccctccttttctccaccgacctgtatcgcctgacgaccgccctcaaaagtacagaacggagaccggaaagaaaagaaatgaagcccgctcctttttatgtcaaatccgtaagaagcccggtcaccaacatatgcacctatacccgtaaagcggtatctatcggagaattcagagacgcactcctgaactattttacagaaaacaagacggacacccgtccctattcattcactgaagacgatttgaacgccatccggtccctacgtgacaacaaatacgcgacgtcggcctggaacttcaatatcagaacataaaatacacatttaaactatgtcgacatttgaaataaaaatgcccaaactgggcgaaagcatcacggaagggacgattgtctcctggtccgtcaaagtaggcgacgctgttcaagaagacgatgtcctctttgaagtgagcaccgccaaagtcagtgcggaaataccctctccggttgcaggaaaggtgctcgaactgctgttttccgaaggcgatacggtggccgtcggtacaaccgtcgccctgatccagctggaaggcgaagagggagaagcacccgaaagtaccactcctgccgcagctaaaagcgacgaaagcacaatggtacagtctgtaccggcagaacccgcccagcccgtcaaatcatccaaggaagaagacggaagatggtattctcccatcgtgctgaaattagcacaggaagccaaaatatcgcaagccgaactggacgcgattccgggaaccggctacgaaggacgactcagtaaaaaagatattaaagattatatcacgaccaagaaaagtggcatcaccccacaaagtgataccgaaaacttgcgtcaaccgtcgacgcagcccaccatctccgatcgacgtaacccaccatcttcggtcgatggtgtccaccatcaccaaccgacgcagcccaccatcgacgatcgacgcaacccggcatctgttaccgaagacgaaacggtcgaaatggaccgcgttgcccgtatcatatcagaccatatggtcatgtcgaaaaaagtgtctccccacgttacaactgttgtcgaagccgacgtcacccgtctggtaaaatggcgcaaccgcacgaaagacgcatttttcaaacgtgaaggtgtagcactcactttcatgcctgccatagcggaagctacagcaaaggcactggctgaattcccgcacgtgaacgcttcggtcgacggctacaaagtcattctgaaaaagcatattaacctgggtatcgccgtgtcgctgcccgacggtaacctgatcgtaccggttatccatgatgcagacaagttgaatctgaacggccttgctgccaacatcgacactcttgccgccaaagcacgcacgggtaagctgatgccagacgatatacaaggcggaactttcacgatcaccaacttcggttcgttcaagagcctgttcggtacgccgatcatcaaccagccacaggtagccatcttaggcgtcggcttcatcgaaaagaaaccggccgtcgtggagacacccgaaggagatacgatcgcaattcgccacaagatgtacctgtccctgtcgtacgaccaccggatcatcaacggagcactgggtggagagttcctgcgacgcgtagcggattatctggagaactgggataaatgatgatttatctgttacttttggcttgatccaaaagcaacagatcacaaaacaattaaaacaacacacaaaataatcaagtatgaaacgatacgatataaaaacgaccgataccgagacccttcgcaaatggtattacctgatgagtctcggcagggcactcgatgaaaaggcaccttcttacctgctccaatccttaggatggtcctatcatgccccttatgccggacacgacggcatccagctcgccatcgggcaggtattccaccggggagaggattacctctttccctactaccgcgatatgctgaccgtcctgtcttccggaatgacggcggaagaaatcatcctgaacggcatctcgaaagcgaccgatccgtccagcggcggacggcatatgtccaaccacttcgccaagccggagtggcatatcgagaacatatcctcggcgaccgggacacacgacctgcacgccgtaggtgtcgcccgtgcaatggtttattacgaccataaaggcattgcgatcacctcgcacggtgaatccgccacttccgagggctacgtctacgaagccatcaacggggcgagcaacgagcagctccccgttatctttgtcttgcaggacaacggctacggcatctccgtccccaaaaaggaccagacggccaaccgcaaggtagccgacaacttctcaggcttcaaaaatctgcgtatcatccactgcaacggaaaagatgtcttcgactcgatgaacgccatgaccgaagcccgcgaacatgcgatcaatacgcataatccggtgatcgtccatgcaaactgcgtacgcatcggctcccattcgaactccgacaagcagactttatatcgcgatgaaaacgaacttgcctacgtgaaagcagccgacccgctgcaaaaattccgccgtatgctgctccgttacaatcgcttgaccgaagaggaactgaagcagatagaagcactggcgaaaaaagacctgagcgcagccaaccgcaaagcgatggcggctcccgaacccgatcctgcaacgatctacgactatgtcctacccgaaccttacaagccgcagaaatatacagacggcacacacaaagaagaaaatggcgaaaagaaaacactggtaaccgcaatcaacgaaacactgaaagcagaattccgccataacccggatacattcctgtggggacaggacgtggctaacaaagacaaaggcggcgtgttcaacgtcaccaaaggcatgcaacaggagttcgggccgaagcgtatcttcaatgctcccattgccgaagactacattgtaggcacggccaacggcatgtgccgcttcgacccgaaaatacatgtcgtggtggaaggagccgaatttgccgactacttctggccggccatcgagcaatatgtcgaatgtacacacgaatactggcgaagcaacggacagttcacccctaacctgacactccgcctggcatcgggcggttatatcggcggagggctctaccattcgcaaacgatcgaaggcgcgctgacctccattccgggagcccgcatcgtctatccttcttttgccgatgatgcggcaggactgttgcgcaccagcatacgttcgaagggctttaccgtctttctcgaaccgaaagcgcaatataactcggtcgaagcagccggttttgtgccggaagacttcgaagttcctttcgggaaagcccgtatccgccggccgggcagcgacctgagcatgatcacatatggcaataccacgcatttctgcctcagtgtcgccgagaagctgaagaaagagcataactgggacgtggaagtcatcgacatccgctcgctgatcccactcgatacggaaacgatcttcgcttccgtgaaaaaaaccggcaaggtgctgatcgtacatgaagacaaagtgttctcaggtttcggagcggaaatagccggtatcgtcggcacggaaatgttccgatacctggatgctccgatccaacgcgtcggttctacctttacccctgtcggtttccatccggtcctcgaaaaggcgatcctgcccggagaagaacggatctacaacgcagcaaaagcattattggaatattaatgaagagggtatatcaaaatcttcttgtccccgcgcttgatgcggggccgcaaaaggacagaccttatcaatcagattttatagggccggttttaatgcgatcccgcgaggggcgcgggaacaggatagtttcgacacaccttctataaacaacatacaaaatgaagaaaataggtttattctatggtgacacaaccgctaaaacagccgtagtcgctttgaaaatacaagaagcattcgcagaaaacgaagtcgtcctgatcccgatagaaggggcgacacgcaaggagttcgaatcgttcgacaatattattgccggaacttccacctggttcgacggagaactgccgacttactgggacgagttcatgccggaaatagaatccatcgacatgacgggcaagaaagtcgccctattcgggctcggagaccaagaacgctatcccgacaattttgttgatgggatcggcattctggcggaagcctttaccaaaagcaatgcggagctgatcggtttcatgcctgtcaacgactaccatttcacccaatcacgagccgttaaggaagggcatttcctgggacttcccctcgatatcgagaaccagtccgaacaaacggaggaacggatactgaaatgggtggcgaaactgaaaaaggagtttcaataatatttgcatttgtttctgctcttggcagggagctgtgtcgaagcaaaattttgcttactaatagatataatttaggcacggatttcacggaaaacacggaaaaaataaattcatccgtataaatccgtgaaatccgtgcctaaaaagattgtgataaaggtgttttccgattactgcaagcgacgaatacccaccgccttgttatactgggcgagagacgctttctgctgataccaagtctgaatcaagctgctataggactgaatccaggaaagctgggcggaaaggacatcgaggatcggaagttttccctctttatagctgaacgtattcaggtcgagattttcctcagcgatcttgcaggcttcttcggcaacatcgatctgcttcgtgttttccgtcaggctggtccaggaattggctacctcctgggaaatctggtcgcgggtgtaatccataacatattccttactgcgtaagatagctttttgggaattcacctccttgaaacgggctccccaacggaacaaaggtatctttagggaggcgaacacggcaggtgtccaaagctggtcggaccctttcacgttcaacatcggagtgccccaggttccctgaaaaccgatagccagtgtcggattatactttgcttttgacaagttgatctgccgcttctggtattcaacattcaatcgggagatcgtaaagtccggccggttctgcaaagcggcctcttcccctatgtgcatcggcaacggctgcaccgtcgtgatggcatcggcaatctccaccggtgtcataggaggaacacccattagcacattcaggttctgcaaggcgatctgataatctttgtacgcagtgcttttgttcaattccgcttctttcaaacgggactgtacctgcaagaggtcggtcttactgatctgcccgtcattgaaacgggttgtcagcacgtttgccaattcctgcacgatatcgacatactggcacatgacatcgtacatgcctttgcgggcagcagcagaccagtagttcaagtcggcggcatatacaatattgtccgtcgtcaggtcttccgcctcggaagcgatctgtccctgtatctgggcggccttgtaattgttgtagatttgtccgccggcatagatcggctgacttacggtagctcccaaactataggtgttatgatccatttcgacagccatgccggggccgaaatccaaatcgtacttattgatacggtactggtagctgccggagaaatcgacagccgggaagaaagcggtcttggccgccttgatagcatgctgcatcgcaatacgctcttccgcactctgtttgatctggcggctatattcaagcactttctgcttgtagtccgcagccgtgacgggcttttcctgtgctcccaccgataaagcccccaacagcatacaaccgataattattttatttctcatactcattataccgatttaatcttaaagaatatacaataggtcaccggaagcacgaagatggtcaggatggtcgaaacgaacagacctcccataatcgtcgccgccataccggcaaacatggcatcgcccaacaatggcaacatacccaaaatcgttgtccccgatgccatcgtcaccggaacgatacgcgtcttggttgcctcgatcaccgcattgaccggcgccagaccactgtcaagctgcaatcctatttcgtccaccagcacgatcgcattcttgatattcataccgatcagacctaacagacctaacatggcaaagaaatcgagcgacttgccaaacaccagcaaccccaataccacaccgatgaagatcagaggcaacatacacataatcaagaccggcttccggtagtatttcgggaagaggaacaacagggtgagatagatcagaccgaacatcaacggaatattggcagcaatcgccttgttacctttatcctgttcagactgttcgccgaagtattgcagtttgtatccttcgggaacctgcacctcttgctggatatcctgccacaactggctgaaagcagccatcgtattggctccgcgtttcggctcgcactgcatcatcatataacgctgacgattataacgcttcacgacactgtactcataatcgagcgagaagtcgtcgatcacctgctccactttgacagaacgccccttggcgctgtagacaggcaaagtcttgatatcgttcaggttcatcgaatcgcgatcggcatctttcagcaggatcggcataaacacatctccttcgcgatattcgcctaaaggcacgccattggttgccgaacgaagcgaataagccatctgctgacgggtgatacctaaacggagacctttttcctgcgagtacaacggcttccataccggaaccttgtttccccagctgttgcgcacttccatcaccatgtcgttcttgcgggcgatttcttgtgcacgctgtgtcagagccaccaacgtatcgatattatcgccaacaaacccgatttcaattgccgcatcaggcacaggagacaaagcaaacaaagctgaacgagtcaaaatatccggatagttggcgaccatatattcatagaacttgttttcctcgctctgtgcatctttcgcgtccttggtttcgatcaggacattggcgaagttcggcttcggaccgatagacgaacttgccagataataacgtaccggcgaacctcccagcgtgaacgaataagatttgatcttatcattattcttgagatactcttctatcttgatcacattcctttccacatcgtcgatcccatacccttccgggaagatcaggtcggcacgaaaatagggcttgttcatgatcgggaagaagctctgcggcataatgctcatgatgaacaaagacaagaacaaggttgccaccaccgaagtaagcgtgagataacgacgtttgatcagacgtcccagcacattttcaaacttatggtacagtttggtgtcatagggatctttggattcacccggtttcgcctccttcaagatgaaattcccgaaagtcgtcgtttgcgtcaaagccaatatccaacttaaccccaaggatacaccaagcacgataaacaatggcttgacaatttcggccaccgaagctggcgccaaatacatcggcaagaaagaacaaacagcgataaaggtcgcacccaacaatgcccactgcggtttggtggccccatcgaccaacgcctgatagcgtgacagaccgcgcttgataccgacctgcgcattatcggtcaccacaatcgcgttatccaccagcatacccatcgcaatgatgaaagcagcaagagacgtacggttcagcccgacaccccagatcagcataatcagcaacgttccgccaaccgagaatagcagtgaactacccaccagcatacctgcacgcgatcccatcacaaggaagataatcacgataacgatgagcaacgattcgatcagattcaggataaatccgttattcgcctcgttggcaatctgattttccggatagatggttttcagttccataccgatcgggaaaagctgttccatctctttcaaatgttcggcaacagcgtcaccgacagccaccacatcatctttcgcacccgtagccacaccgataccgatggcccgtttgccatccacacgcatcaggttggaaggcgggtccatatagcctcgttcgatggttgcgatatcacccaggcgtacttcgcctccaccctttgtcacgatcagctggtcgcgtatatcctctatacttttatatgtaccttcggcacgtacacgaagctggtaggtcccggtcatgatctcacccgtattgaccagcaggttctgggtttgcaggacttgctgaatcgaattcggatcgatccccaagttcgccagcttgggaaccgagatacgcacattcacgacctgcgtctgttccgcaaacagatagaccttctgcacaccctgaataggagtcagctcggtcttgatcttctgcgcccaatcgcgcatatcgtcgtaggtaaaaccttcgtcggctgtcagggcgtaatagataccgaacacatccccgaaatcatcactcacattgatagcagaggcgccactcggaaggcgaggctgtatgttagccaccttacgacgcaattcgtcccacttgaccggcatataatccggggccaaagtcggctgcaactcgatcgagatcttcgacatgccgaaataagattcagacttgatctgaaaaacatccgacatggactgaatttccctctcgataggttccgttatcaatttttctacctcctgaggagtagcacccggatattgcgtaaccaaaacagcctgcttgattacgaaaggcgagtcctccttcttcggcaatttaaagaaagaatatatacctcctatcagcatgatagccaaaaagaaatatataatcttcttattctctaaagaatatactggaagattcattatttatcagcttaatctgttaatacttttacctgttgtccttcaaccaggcgggtagccccggcggaaacgacctggtcaccggctttcagccctttggttattataacattgtcttttcctaccagtccggattcttcgatctggcgacgttccaccttttgcgactgggcattataaacaaagacaaatttgtcgttattttcttcactcgctacaatagcagaaagaggcaccaacaccgctccctcgttaaagcttgcactctcgatatgcagcaccacgcgacaggagaagccgacagccactttgtatttgttcagattaaattcgggatcgtcgatatataggaaaacgggaacgccggaaccatcgggagacgcttccacatattccttcactttcgctttgaaacggattcccttgtagttatcaaactccacatagatctgataaggagtcgagaaataggtaatgttcgtttcaggcatcgtatactggatctgcaacttgttcgggttaatcaagcaaacgatcccttgcccggcctgtaccttctgataattctcgacatatttcttctggataaatccatcgaacggagcacgcagtttcgtttgttccagctgattctgcgcatattcgaatgcagcctttgcattcgaataggaagcttcggtcgtctcatattcctgcttcgaaatagcctgtttggataacagcttcttcgcacgttgcaactgtgcttcggcagtttgaaaagaggcttttttcgcttcatattcccatttgaaatcctgagggtcgatctctgccacgacctgtcccgtacggactttttgtccttcatccaccttcagcgaaatcagcggtccggacattttaaaggccagatcactgaactgatccggcgatacgacaccgctaaacgacttttccacaagattcaatgaggtcacttccgccaactttaccggacggggaccttgctccttcaccggcggctgactacacgacatcaatgctgccaatacaaaaacagggattaatttaccattcatgataacttgcatttagttatttattattactattatattctgactattaattgcatacccagagaatacaacattcttttaaaatctattgttccggttccgaccggatttcaaagtgtaccctccgataatttttcggatatacgcattaaaatgaccaacggctccaatcaaccgccgcttccatttcgttttcctgatcgtcggggatagacgggaagaagtcaatacctgttgccttctccacgctgtcgataggtatcgccatcggtttcagcgaattatctttataatccctattctcgaaaagaaatccgatacccttatagcctttctccgtatgataacacaataccttataaaaggctttgggtatcgcaaccctgttttttcccaaccgtttcatatcgcctgtaataacggggcccgtaacaatcaaaagcgaaccgttatccaacgcccacaagcggcactgttcctccaggtctttccatatgccccggtttaatttcggtttttgcgggcagatattgctcaggtaaaaagactcgcgcatggcttttgcagaccatttcatatcgcctgccggagctaaatggccacgatcgtagccggaacgcgtataatcttcgttcatcgccgtcgaacctttcacctgcgggtcgggtacaaacttattagaacgttccgtctttttgcttttggcttccgttgccgtcaattcgtacgcgacccagttagctatacggtactcggaattataagaaaccgtatatccttcgtgcttgataacctgctcctggcgtttctcctttaggcggggtatctctgtatttgcggggattttaaatgtttttgtggaagacttggcaagagtcttataggcagatgttttgtcctgtatcttttgtttcggagcggttgcagccttttttgaagaaacgacttcctgtccctttttctccagagccgtcggtttgtgtccggccatcggaacaaaataatcatatataaacagaacccctataaaacaagccactacaataaaggcgccaataaacattcgcttcactgtggaaaggaaagacgaagtcttttgaacttttttccgcggtttccttgcgctttttctctttgccatctctcttgataaaacctattcctacttaggcgcaaaagtagacaatataaagatgctatacaacacatatggagggaatgtattggtttgaattgttagaaaaaagtgccccaatgcacacaatcctctataaacatgttttcaaaccaatcctaagtaaagatggaacatattataccaacaagtatatcgatataaaatgacagatgctaccgcccaatacgaagaaatgccatactggatgcatatatttatatttgtctaaaaagaaaaacaggcagcctaccgtataaaatagccctcctccgatcaaccaatacagaacatccatcgaaccggtctcacgaaagacatgcaacaagggtttaaaagcaattatgactacccaacccattgccagataacaaactgttttcagatggtctttctttctcatcttcctgaaactcagccagacacctgccactgccgcgatccatatgacggcgaatagtgaccaaccccaataaccttcctgccggagggccagcaacgtaaagggcgtataagttcccgcaatatgcaaataaatcgcaccatgatcgaaccgccgcaagagtcttttctgtcgtgcacgggtcgaagcatggtaaaatgtagacgtcacatacgaaagtgtcatacaaacgacataaacagcaaaactgccgatcgcccaaggatttccacttcggatagccgccatcatcaaaataatgatagcggtcattccaaaaagcattccggcaccatgtgtcaagacattggcaacctcttcaccatatgtttgtcgttgcctggcagccatccgcttataattgttcggccttgaacccggcctcttttactgctgcaatcacaatagcaggagcaagatcaactttcacttccaacaccttattcggatcggccaaatcaatcgaccagtcatccgaagccatcaatgtattgagctttgcacctattgccgctacacatccaccacactttgcattcgttttaaattttattgttgccatagctgttacgatttatgatttatgaatacaaaaatagggatattgccatgaaattataattcataaatcataatttttttcatttcatgaatttcaatcttaaactattcaataccactgagacggaactgaaagccattgctgcactcgccagcatcggattcaacagcagtccgtttatcgggaacaaaacgcccgcagccaatgggataccgattacattatatataaatgcccaaaacaagttctgataaatcaggcggactgtctgtttggacaaacggatcgcaccgggaagcagcaacaggtcggacgtgataagcgtaaccatagccacatccattgcaatatcagttccttttcccatcgcgatgctgacatcggcccgtgcaagcgcttgcgagtcgttaatgccatcgccgaccatcgccactttcttaccttgctgctgtaaagatatgatatattcctccttatcgttcggcatcacttccgccttataataaccgatatccaaggttgcggcaacccgttcggctgtccggacaccgtcgcccgtcagaagatgtacttctattccctgctttttcagttccttaacggcttccgcagaagtcggcttgatacggtccgagatcgccagaactgccaataggcgggtttcctgaccataaaaaacaacactttgcccatcttcctgccattgcccgatttgcttccgtaccttttccggaataccagcctgaaatatgtcaagcaatccctggctccccgcccagtaggtaactccttcgacctgaatgcgtacgccacgccccgtcaggctctcgaaattttctgcctcacagacctttgcaccggattcttccaaccaacagagaatagcggatgccagaggatgttcggatttctgctccgctgtgtacaagacgtccaaataacggatattgtcatctgaaatccaatacgaatccgtgacaaccggcacaccttccgtcaatgttccggtcttatccaaaacaaccgtatcgaccttgcatagattttccaaagcgaaggcatccttaatcaggatatgctgttcggccccttttcccattccgaccattaaggcagtcggcgtagctaatcccaacgcacacgggcaagcaataaccagcaccgaaacggcagatagcaatgcatatgaaaaataactttctcctcctatcaccagccaacaaacaaaggtgagaaacgaaagcaatacgacgaccggtacaaatataccacttattttgtctacaatccgctgaacgggggccttacttccctgcgccgattgaaccatctgcacgatctgggccaatacggtcgtacctccgacacttgtcgcttccatcgtaaaagcgcctttctggttgatcgttccggccaacactcggtcaccggcatttttctccaccggaatcggctctccgcttagcatactttcgtccaccgaagagctcccctgtaaaagcgtcccgtccactggaatcttttcgcccggccgtacactgactacattaccgacctgaagattcgaaataggcacctcctcttctctaccgtccgttaccaaacgagctgttttaggctgtaatcccatcaatccttttatggctgaagaggtactgttcttagcccgctcctccatcagtttgcctaacaagacgaacgcgatgatcacacctgaagcctcataataaacatgtggttccagtccttttcccagccaaaatccgggacataaggtgttgaaaaggctgaacaggaaagctatcgaagtactaagtgcgaccaatgtgtccatattggcttttcccttgagggcatgccgcacaccgttcacatagaacgaacgtccgaaaaagatcataatagccaatgccaacaccatcatgatccagtttccaaacggtacatgcatgaacaccatccctaaaagcgccaacgggatagacaacgtccatgctcctatggtattcctcctcaatatcttataatgcattcgagctttctcttcctgcatggctacagggtcctcggcttcgactatcagatcatatccggcagcctgcacagcagcttgcataacctccaaagtgataacggacggattataagttaccgtcaatgtaccagcagcaaaattcacgcttgccttctccacaccagataatgcctgcaccgtactctccacgttgcccgcacagacggcacaactcatttcaagaacaggcaataccttcgtttctgtttctctcatatcgtgtttaaatgtcaaatttgtttcattagtataacaaagatacggtttattcggttattttgtagccaaataaatattctttgattttaatagaattatttgcagataaaggctattatttaacattcgaatatacgacctttgccaataatcaaacgaatgaacgaattaaataataagacgtatgatacttgattcattaaacaacacaaaaaaaatcgaatgcctgcatcctctattcaaaaaagcattcgactatctaaaatctacagacttctctaaagtggaagatggtaagcatgaactggatggttctcgcttatatgtaagcgttgtcagtatctttggcaaggaaaagaaagatgccgctatcgaaacacacaaaaaatacatcgacatccaaatgcctctgttaggtgtggagaaaatcggttggaaaccgggatgtgagctgcaggaagaatcaactccttataacgagcaaaaagacatcgctttctatatcgaccgtcctacagcctacaccaagatctatccgggacagttcgccatctatttccccgaagatggccatgctcccggtatcggccaaggtaatatccgcaaagtaattgtaaaggtgcaagtggaagaataaaaatgaagccgacccttaaaagagtcggcttcattttttgagaaacagtgcataaaatctcctcaaacaaggcagataaacagctccacatccccgtcccggtttcacgcagatccgggtctccacctcttccacacccggatctcccatgcccttccacccgggtctgaagaaacttttcaagttgtttttggtaaaagaacagcttgtcttcatgaaaaaacaagcctatttaatctattttgtatcagcttcagaagatatctggaatttgatagaagattgacatataatactttattgtttttaactatgatggttatgatagatgaatgatagttgaaaacaggaactatcataaaataacatactgctttacaagtatataaattcaattatgatagtatgatagttgttttgcaaaacttttatatagattacccggataaacgtagatccctaaaatctacgtttatccgggtgtcccgtgtcatctatcgtttagtagtaaacaccgactgtttcaccatgacttatgcatgcatcaccagcaacggcgtgtcggtatggaacagcatcttacgggcgatcgaaggattgaacatacgtgccaggatattccggcgataggtactgagcgctatcacgtcgatatgttcgtcccgcacaaacttttcgattgccagcaacaggtcgccgtcggccagcaccgtatgggtgatatgtgcttgcggatactgcttcttgaaatactcgttgactccggtcagccgtatttcattccattcgttcttacttgtcgagatattgaacaaatgaatgtgggcattgtacggtttgatgatttccataaactcatcgaatgccaccaagtcgcgttgattgaaggaagtggcaaaagctatatttttagcttcgctcaaatcttcaaaaggcacattttcgggaatggccaggacaggaaccttattcacctcgatcacttcacccgtgacactgccgatcaggtccatatctttctggctctttccacgagtccccatcacgatcaatgacggatggtattccttgctataggcaatgatctcttcttccggcaaaccttcgcggagcacataattgtatttcactttaggaagttcaccagaatgtatcttgcggttgatcaatgtacagatgttttccatatcgatctggacacgcttcaggacattctgcgccgtctcttcctcgttcacctgataagccaatgtgtcgcccatcggaatagcagacgggaaataaggactgaaataagcgtgcatgatcatcacttcggctccgactttatgggcatagttgattcccaattcacacgctttgatagaatagtcggaaaagtctatcggtatcaatatcttcttttcctgatgaccggctttttcctcttgttcggcatcctcgctaagccatttactgtcttcgatgatacgcaaggcatgaggcagatcgctttctttaattcgcacacgtacaccagccgaaactaccggttggatttggttcacattgtgtatgtaaacttcaatcccctctgtttcaagcatcgttttgagaatctgagctttctcaaacgtgtgaatcgctaacgttactaatttatcttccatactcgtgtgtttttataaattaaacaatcggaaatcactaaatgttgagaaaaaaaaatcccacagcgtcttttcagattcagctatgggatttctttgtaaaatgaatttctttacgcttgctgtgcttccgacacttcctcgttttcagcaagtatctgcaaagcacgctcgaatattgtggtatcgtccaatactaccaagcctccgtctggtcccggttcaatatgtattccacaacttttgccatctttaaaattatgcccgccgaaatagttgcgaactgtttcaacagagattcccagttcatcagcaatacggtgagtacttccgtcaggcaggctgtctttcagtctgcgaagttcattaaatgtaatagtttttgtcatggcttccttattttgaaggttaattactttgtttaatttcatgccactaacttagtcattataaattacagcaacaaaattattccatataaataaatatgctttacgacatgtatcatttttgcaaacaagccgcaagcggtacattaaaaacgataataatcaggatcgtcacatatattgcatagacgatgagacggatacgtttcttcgagtacagtggttccccattattcacctgcacaggaagcaacttcgaacggctgaaagaatagagcctgtagaccagataaccgaagaacacacccgaaatggctcccggcacgatatccgaaatgaagtgaaccccgagataaacccgtgtataagcagtaagagccgcccagaaaaagattgtccagccgaacaacttatcccgcatgatcaatgccataagagtcgcgaaaccgaaagcgttcgcagcatggctggaaataaatccgtaaagtcctccccggtatccgaaaacagttttcacctgatccataaaatcaggatggtgagtcgggcggaaacgggtgaagacaggcttacagacgtgagaggcaaactggtcgcacagcgtaacgaccaatacgatcgccagcaggatcaataatgactcgcgccagttctttttatagatcagaaccaacaggatcagaaaggctaacggcagccaaactgcctttcctgtgaaaatccacataaaacgatccagaaaagcagagtcgctgccgttaagcgcaaagaacgcgtcgcgttcgtaaattagtattttctcaaccattgaaaaaggagatttgtgatttgtgatttataatttatgcgtcaatgataaatcataagttataaatcacaaatcctaaatgatttccatgtctttgctgggcatccatcctacatttccatcttccatttctatttcattccagtctcccaacttgctcttgatagagatcttcgttccttcatgcagaataaacaagtcggttccgcttgcatcgggagaacttttcactgtcactgtcggagcaaacacgatcgcgctcttccggtttatcagctcgtccttctggttgccggcaaagatattggcaaagatgaccaacaacaagaataccagccccagataaaacccgatcttcttcaaatgaatccacttggagaagaagaacaggatcagacagccgataaaaaggataaaacaaacaataccgatttgcgcccacgaatcggcagcccccatgttctgaaccttgtcgaaccaacggtgcaggaagaaatcgcccaccggctcgatcttgtctacagacttctgacgtgccagctgcaaattgaaacggatatccccgtctcccggatccaacagcaaagcccgctcgtaattcaggatggccggggcaatcttgttctccttataataggcattacctaagttatagtaaatctcagccgattcgccatgcgttttcagaagcccttcgtagagttcgatagccttgccatagtcttctttcgtataggcaacttccgcctctttaatcgtcgcctcttgagcaaatgcccctaaggtaacgaattgaaccagcagaaagaatacgatctttttcatatttatattcatcttcatcgcgttactttttaattgtattttccattttaccaatggcatccactgtctgttcatatagcttatccattgcatccgaagcctgtgccggagcatagcgggcaaactcgcaagtgttcaggatatccataaattctttgatcaaagcgtcatccacaccatactttgccagttccgtttcgacattatcctttgtcaggttggcctgaggtatactcaacttgtcgcttaagtagccccacaaggcacgaagcacttcgtcatagaattcttctttcttgttttccttcatcagcttgccggcatttttcagacgtcttaccgccatcttattggctttcttcgtacggaccaatgccagattggaattttccttcacctgcttgcggtagatgaagaagaagacaatgaacaggattgccggaatcagatagcacatatagtacatgaatgaaccgaagaacagttcattattcggaacgaaatgaatgccgttcactttcaggtaacggatatccttacccagatatttaacactttccttgttgctgaagttagaaacgacaggagaagatgttccaccccccttgccctgctctacgtgaagtttgtatggttcggaggtaatcgtcttataggaaccggtcttcgtatcgaaataagagaatgcgatagccggaatttcgaaatcgcctgcgtaacgcgggatggccatatattcgatcgtcttcgtaccggaagttcctgccgcggtagtcttgatgtccacttccaccttcggatcataaacgtcgaaatcgttcgggaaagcgacttccggattctttaccagcttgatgtttccattaccggaaatcttcaccttcacggtaacggcatcatctgtctttacattattggaactgatgctggatgtcattgtgaaattgcctaccgcaccggagaacgaggccggtttacccgacggcaacggcttgacgtcgatcgttacagggggcgttgtcaattctttctttacatctatataagacgacgaaccgaagaaatcatcgaatacactgcttctctgtctggccggtccgggcacacgcaaaacaatatccagtttcccggaaggaatcgtaatcttccctgaacgctgagggtacagcaccgtctgttttataatggcagtcccatagttctttcccttatagttctccattaccagttgcttattttgcggcaattctacctcttgggcaaggaaacctgtaaattcgggaaatttaggctggtcgatccctccgatatcttttcttacatacaatttaaatgtaaccaaaataccttcctgttcatatacattccgtttagaaacatcgattgtcagaaaagcatcgtccttactgataccggtaccggtcgaaccgcctttggttgcctcttccgccttatcgggaggaagcacttttatcaccaatgcgttagatgtgtaattggcgcctttgaccttgattgttgccggtgcgatattgaaagtaccctctttcttcggttggagaatataggtgaacgtcaatgacgtttcggttgtcattttaccgttaatgatctgggtactcatatttgtggaagtagacggacctatcaatacctcaaagtccggtatttccggtacacgtatatccttaccttccgcattcaccgtgtacgacaatctgaaagtttctcccataacaacagcttccggagcagaagccttgaacgtcacatccgccgctctggctaccactccgaaagttgcaaagagaacaaataagaaaactaatttcctcattcctcaatccttattttttaatttttaattcttaattttcaatttctgtttaccactccttatccgtgcgacgacgctgttgctgttgagcctgcgctttcttcaccttctcctgagtgtctttttcatcctgcaggaaagcatccaacatctgctgagcgttatccttgctcatctgttcctgctgctgcggctgttgttcctgtgtcttatcctgcttcttatcatcctgctgttgttgctgatcttggttctgctgctgttgatcctgtttatcctgatcttccttcttgtcctcgttctgatcctgattttgatcttcattctgctgattctgctgatcgtgcaacaacttttgtgccaaagccaaattataacgtgtttcatcatctttcggattcaggcgcaaagattgtttgtaagcttcgacacttttggcatactctttactctgcatgccaatatttccgacattatggtaaatctcagccaagcgggctttaccttcgggcgtttcgatcatcttctccccctgtccggctagcaactggtactgctcagcagcttcagggaatttcttctgcttatacaaagcgttccccaagttataagttccttcggacgaacgcgggttcacttccaaacttttccggtaggcgatttccgcctcggtaaacttctccgtctcataaagtttattcccctcccgcacattcttacgttccgccttctgggcaaacacagccccgcagcagaacatgaatgccgccatccatataatcgattttcgcatacgtttcatcttatccatagcattttaagagaataattttacttttttgaatacacggttcttgcggtccagcgtcatgaaatccactaaaagcagaatcaatgcgatccaggcaaacgtctggaaacgttcgtcatattccgaatagactttgctgtccagttccgatttattcattttatcgatctctttttgaagtgcacgaagcgctgaattggtgttgtcggcacggacatacgtcccatggccggcagccgcaatctcctgacacatctcttcatttagtttcgtgatcaccacattcccatccttatccttcatgtagttgttgctaccgtccaccgggatcggagaacctttcggatcacccatgccgacaatgtttacatgaatgcctttttctgctgctgcggcagcggctttcacggcatcgtcttcgtggttctcgccatcggtgatcaggataatcgccttgtccgatgtctcgctcggtgtaaaggaacgcatcgccaggttgatagctgcgccgatagccgtaccttgtgtcgacaccatcgacgggttgatggatgaaaggaacatcttggccgagacataatcggaagtgataggaagctgcgtgaaagcatctcctgcgaaaacgatcagtccgaccttatcattagaaaagccgtcagtcagcttagacaacatctgcttggccttggacaggcgatccggcgagacatcttctgccaacatcgaattggatacgtccagacaaaccatgatctccactccctgacgcttcactgtctccagtttggagccgaactgcggtccggccataactatgataaccatcgtgatggctccgaacaacagccaaaacttcagatgctgacgcttgggagaaacctccggcatcaactctgccaacaattcgggattaccatatttcttgattgccttcttcttcaagacgattgcatacacatagaatgcaaccagtacgggaagcaagaagagcaagtataaaaagtccggatgtgcaaaacgaaacataagccttttatatttacggtatatttcttaacaatgtatttctcaataatatctcgaccagcaacagcgagaacagcaggatcgcccaattcttgtactcttcctgctttttactgtattcctgcacgctgatcttcgtcttctccatcttatcgatttccgaatagatctccttcaggctggcattatccgtcgcacggaaatactgtccgccggtcgtagcggcaatctgcttcagggtcggctcgtcgatctccacatcgacatccatatactggacaccgaaggccgtctggaacggataaggagccttgccctgcgttccgacaccgatcgtatagacacggactccgaacgtcttggctatctcggcagccgtcaccggagcgatctcgccctggttgttcacaccatccgtcaacaagataatcactttcgacttggcctggctatccttgatacggctgacagcattcgccaaccccagaccgatcgccgtcccatcctggattatacccggctggacatccttgaagaggttcaacaagaccgtatggtcggttgtcaacgggcattgcgtgaaactctccgctgcaaacacgaccaaaccgatattatcgttcggacggccgttgatgaaagcggacgccacatctttggatgcttccagacgattcggtttcaagtcctgcgccatcatactggtcgagatatccattgccagcacgatgtcgataccttccgtcgaagaattctgccaactgttggtcgactgcggacgcgccaatatcacgacgaggacagctactgccgccatacgcaaaatgaaagggacatgcctgagccagactttccaggagcttgcttccggagcatcgaaaccttccgtagacgacacctgcaaacttgcctgattcttgctcagtttgtagacgtaccatccgatcatcgggatcagcaacaataacaaatacagatatgtaggatttgcaaatatcatcttattctttacttatatttgaatcattcttttctacagactttacttcaccttcagccttttcaccttctccgggaacgggaatctcttccaccttcgtctggttaatgaacagataagcgttcatcaaactcaagtcgttttcatcgggtagcggattcatcttcgcgaacttcacgaaatcggccagttgcatgatctgcttcaggctttcatagacagaagtcgcctcctgctgcttacggatgatatcgagtatctcaccggaagtcatttccatcgcattgataccgaaacgatccacaatataacgacgcaacgtatccgtaatcaatgtataatactccttgctacgcccctgttgccagagcttctgctgcttgatctcgtcaagttccttgatcgcctgttcgtgaggcggaagtttaggttccggcttcttgaacggcaggatggactgacggttacgcatacgtttgatcacataggcaaccacacagatcaggaacagagtcagcaacacgccgaatatccagggatagtaatcggccaatacaaaaggcggcttccagacgtttttaatatcgtaaaactcctccggtttgtcggcattgacaggaaccgtcgacaccttcaaggccacctggttggagtaaacggtatccgccccgtcgatcaccataaacgggggcaacaaatatagagaagagtcgaaagaggtcaccagcaagtcctgctcgatcagcaggcggtcgttttcgatcaaggtggagtccgctttcggaatttccagcacctccactcctgccatcaacgtgtcacgcgggatgacaagctggacggccttatctttgtctgccgttaccgtcaaatgtaaaacagtctgctctccgatcagtatggcggcagagtcgacacgaacgtcaacgagcgtctgctgcgcatatgctttcccgccggacaggaatgttccaccggcaagtgcaagtaacagaatgcttttctttattaatttcatttgtttgctttaattacgtttgtcaaaaagagcaatcaatgctttcacataatcatcttccgtacggatggagaccgaatcgacacgacatttcttgaatgaatcgctcatggcagcctgccggcggtcccaccattccttgtaggcagcccgtacacgggcagacgagctgtctatccagcgttcctgtccggtctccgcatccttgatcttcatcaaccctacagccggtagttccgtctcacggcggtcatacacctgtatggccaccacgtcatgcttgcggttggcgatggtcaaggcatccttgaaaccgtccttgtcgataaagtcggagatcaggaaagccgtacagcgcttcttgatcgcattggtcagatatttcaatgcctgtgcaatgttggtctgttttttatccggctggaagtcgatcagttcgcgaatgacatacaagatatgcttcttccctttctggggaggaatgaatttctctatcttgtcggagaagaacaccacgccgatcttgtcgttgttctggatagccgagaaagccagtgtcgccgcaatctccgtaatgacttctttcttcattacattcacggaaccgaagtctctgctgcccgacacgtcgatcagcaacatcaccgtcagctcccgttcttcttcgaacaccttcacgtatgggcggacgtaacgtgcggtcacgttccagtcaatatcacggatatcgtctccgtattgatactcgcgcacttcgctgaacgccataccgcgccctttgaacgccgaatggtattgcccggcaaaaatattgcgtgacaagccgcgcgtctttatctcaatccgtcgaaccttctttaatagttcacttgtttccatattattcagttgaaagttgagagttgaaagttgagagttaataaggagagctaaaaacgggctgcttacgcaactttcaactctcaactttcaactatttaagggacttcgactttgttcaggatttcgctgatcacctcttcggatgtcaggttattggcttccgcttcgtagctcaaaccgatacggtgacgcatcacgtcgtggcatacggcacggatatcttcggggatcacatatcctctgcgtttgataaaggcatacgcacgggcagccagcgccaaactgatggacgcacgcggagaggctccgaaggagatcatgttagccaggtttgccaaaccatgttcctgcgggaagcgggtagcaaacacaatgtctacgatatagcgttcgatcttttcgtccagataaacctcacggacaaccttacgggcttcgaggatctcttccttcgtcaggatcggtttaatgtccggcttcactccggagatattctgacggataatcaacttttcttcttctttcttcggatagttgatgatgaccttcagcatgaaacggtctacctgtgcttcaggcagcggataggttccttcctgctcgatcgggttctgggtcgccattaccaagaaaggagacggtaatctgtatgtattttcgctgattgtcacctggcgttcctgcattgcttccagaagggcactctgcacctttgccggagcacggttgatttcatccgccaatacaaaattagcgaagactggaccttgtttgacttggaattcttcgcttttctgactataaatcatcgtaccgatcacgtcagccggcagtaagtccggcgtgaactggatacggctatacttcgcatcgatcaatgatgccagtgtcttaatggccaatgtctttgccaatcccggcacaccttccagcaggatatggccatctgaaagcagaccgatcaataatgattcaaccaaatgtttctgtccaacaattacctggtccatacccatcgtaatcatgttcacaaacgaacttttactttcaattcgctcgttcaactcacgaatgtctactgtctgactcatagatttttttcaattatattgttactattttttacttgctttttttaagatgcacaaaattagaaatgttaaattcgtattctgcactttcgcagttaaataatactaacctgcacagaactattttgttttattttacttaaaagagagagtttttattacagtttgccactcagtatctcagtctggcgggcagcggctttttcaatggaagaacgatcacgacggtcgatgccgtacatttccggtgcaggcacctcgatcacagtgccgataggcacgttattcgggtccgttatgacagctctgttatattcatacagatatacccagaacaatttgcttccgtaatatttcaacgagatcagcgtcaggcggcttcccggctcgatcttgacacgggcaatgactttaggcgaaacggcttcggattcaacttccggattttccaccgttgtttcacccacagtctgggaggaatcttcattggcaaaaacgattgtcgtatccggaacggcttcggtcgcaacagtctctcctttgggaaagaccgtatcaatcctcaagggctctttttccttttcgaaaaagtacgtgcgattcaggtaaagcccgatattgaatagcataagaaggaatacaaacatagaaacaacggcaatccgcttcgtgcggggcttctttctttccgcatccggaccagtttctacctcttcgctcggactgtcaggtccggaactatctgaacgttcgtccacaaccggttcaagggtatccatcccttcatcttcgggctgcccggcaggttcttcttctgaaaagacaaccgggtcttcttccggaggaacagcagatccctcttccgagaagacaacaggttcttcttcgggaagatgtttctcttccggtatcatctcctcaatcgattcgtcttccgtctcttttatgttcggttcgtccaacacgacatccatatcggtaaaatcgacattctcccgcagttcggtcgtttcaaaaaaagagaacggtttattaacaagctcccgcagttccttgtccggcaggaaggaaaacttgtaatgttccgggattacaaaacgttcacccgtattcacatgaatgctttcacgcttctccaccggaatgatcttaaaagtaccgagccctttgacctttaccagtttatccgtatagacaccttccgacacgaccgctatgaattctctcaaaaagcgctcggaactattcttgtccttacctgtatattcggccaacagaccggccagatcctgtatcgccagccggttattcatggtcgcctaattcttttagtttattcttgacggtcgttccgggtttgaacaccgggacaagtttgggaggaactaaataccgttttccgtttgaaggattgacagagatccgttccgctttttttttcacctcaaactgaccgaagccctgcaaatatatggtgtcgttatctaccagacgcgaactgacgacggaactcaggacagaaagcgtttcagcaacttcctgcgcagtccaacccatacgggcggcaagttcagtaaccagttccttatttttcatatccgcgtccattaatagattatgcagctatattagttattttttcgtaaaccgacaaacatctttgcagtttttatgtcaaattaaagtacgcttccatacaggtcgaaagcttgcgcatcgtcaatccgcacgttataaaacattccgggaatcaacagcttctctttagaaacaagtatttccgggtcgacctccggcgagtcgaattccgtacggccgacatagaaatcttcttcttcccgatcgatcatcaccttgaatacctttccgatcttggaaccgttcacttcggccgaaatgccttcttgtatacgcatcagataatccaaacggtcttgtttgacttccggatcgatatcatcggtataatgtttaaacgaataggtcccttcctcatgactgtaagcaaaggcgcccatacgttcgaaacgggcttcttttacgaattcgaccagttcttcaaaatcctgctcggtttcccctggatggccgaccatcaaggttgtacgcagatggatgccgggtacttcttcccgcatccggcgtatcaaggcatatgtttcttctttcgtgatgttacggcgcattttcttcaacatcgggtcgctgatatgctgaagggcgatatccatgtatttgcaaacgttatcgcgttcgctcatcaccctgagcaaatcataagggaaatgggacggataaccataatgcaagcggatccattccactcccggaatatcggagatgcgttccaccagttccggcaacgcatggcgtttatacaaatccaaaccgtaataagtcaaatcctgggcgatcacctgaaattctttcacaccctgtttcaccagcaggcgaacctctttctcgatctcttccatcggtatggactggtaacgccccgtactgatcggaatggcacaatacgaacaggtacggtcacacccttcggcgatcttcaggtaggcgtaatgccggggagtcgtcaagacgcggtcggcagccaattcccggtagtaggatttacccaaatcgttcaacagttctttccaattgaactttccatagaaacggtcgacttccggcaactcattctccaagtcttttaagaaccgttcggaaagacatcccatgacaaacaatttaccgatcttccctttcttcttggcctctcccagatcgagtatcatattaatcgactcttcctgggcatctccgataaaaccgcaggtattcacaacaacgatttcaccattaatcttatgggggtcatgttcgacggtatacccgttcgccacgaactggcgcataagctgctccgaatccaccaggttctttgaacatcccagcgttataatatctaccttatttttcctcatatattatggtacaactccctttattctccgaaaagggagtttacaaattcttttctattgaaaacctggagatcctccattccttctcccaagccgatgtacttgacagggatacggaaatgatccgaaataccgatcacgacgccacctttggccgttccgtccaatttggtaaccgccaaagcattcacctcggttgcagccgtaaactgcttggcttgttcaaatgcgttttgtccggtagaaccgtccaataccaacaagacttcgtgcggtgcatcgggaaccactttcttcatcacattcttgatcttggtcagctcgttcatcagattgatcttgttatgcaggcgaccggcggtatcgataatcaccacatctgccccgttcgcctttgccgaactcaacgtgtcaaatgccaccgaagcagggtcggaacccatcttctgcttcacgataggcactcctacccgttcgctccaaatcaccaattgctctacagctgcggcgcggaacgtatcggctgctcccaaatacacatttttaccggccttcttgaactgataagccagtttgccgatcgtggtcgtcttgcctaccccgttcacgcctacgaccatgatgacatacggcttcttgtcttccggaaccgtaaacgactccaggtcttccgtatgattttctgtaagcagggaagcgatctcttcacgcaggatcgctgtcagctcactggtcgtcacatatttgtctctggctacgcggtcttcgatacgggatatgattttcagtgtagtatctactccgacatcggaagtaatcagtacttcttccagattgtccagcacttcgtcgtccaccttgcttttaccggcaatggctctggtaatcttagaaaatacattttcttttgtcttagataaccccttgtccagagtttcctttttttccttactgaaaaagctaaaaatacccataccttaattattgcttaattatttcttttctgaatgagtgcgctaaattactaaataattgacaattgacaattgacaatcgacaattttatttgcacaacctgatttacaatccagacattcctcttctttattaattgtcaattgattcagttcattcttcccttgtaatcttcgtagccgaactctttgtacatcacaagccggtcctccttgctccacaaagccagggatggatgcgggattccgttgaacatggtcgttttgacaacggtataatggatcatatcttcgaatatcaatttatcccccactttcaagggttgctcgaaagaccaatcgcccatatagtcaccactcagacagctgtttcctccgatacgataaacaggctttccttcttccggctctatagccccgcgaatcaccggtttatagggcatctccagacaatccggcatatggcaagtgaaagaggcatctatgatcgcggtcttgataccatgattctccacgatatccaccaccgtcgtcaacagaaatccggtttgccacgcaaatgcgcttcccggctccatgatgatttcgaggttcggatatttagccttgaacgcctgcaacagcccgatcagatgttccgtatcatagccttttcgtgtcatcagatgcccgcctcccatattcaaccatttgatatgcggcaggaaacggccgaaacgcttttccacttctcccaacgtcttttccagatcatacgaactcgattcgcaaagcgtatgaaaatgcaagccctcgacaccatcgggcaactgaccgtccaaaaggtcgctaaccactcccatccgggagcccggagcgcaaggattatacaaatccgttttgacatccgaatattcaggattgatgcgcagaccgcacgatacccggtttccgtccgcctgcaccatcggatagaaacgttcgaactgcgtaagcgaattgaacgtcacatgactgctgtatcttaaaatctccgggaaatccgcttccgtatatgccggcgaataggtatgtgcccgactacccatctcttcaaaagccagcctggcttcaaacttcgaacttgctgtcgaatacggaatatattcacgcacgatcggaaatgctttccacatcgcaaacgccttaaaagccagaattacattaactcccgccctctccttcacgctcttgatcagtgacaaattacggcggagcaactcttcttccatcacataacagggagatggtatcatattgaagtctatcatccggtaagtatttttctttgattctgttgggcaaagatacataataaaaagcgaaaaacaagaacagggcttatcgcctcccttcttcttatcgtacttttttcctaaagatccgttagtccaaatcaaaacacacaggcatgaaaatgaaatcctccacaacaccggaagcaagaagcccttttttcctcattaacaattattaccataagacacgtacccttatctactaaaataaagtagatttgcgaaaagatagtaatctgaaattcaaaaaaaacaacaaaacaatggaaagactgactgcacaagaagaaagcgtgatgttgtatatctggaaattaggatcatgtttcatccgtgacatactgaacgaaatgcccgatccgaaaccgccctacaccagcgtggcatcggtggtccggaaccttgaaaaaaagaagtacgtcaccccgaagaaattcggaacgatcacactcttttctccacgtgtgaaagaagcggaatacaagcgtactttcatgtcgaatgtcgtacaaaattatttcaccggttcttataaagaaatggtttccttctttgtccgcgatcgtaaattatccaaaagcgatttgcaggacttgatggatcagatcgaaaaggaagaataatcaattataaagatatcaatatgataactccgatactaatctattttctaaaggtaaatctggcgttggcatttttatatatctgttatcgcctattattccgtgacgatacgttcttcaggttacgcagaggggtgttattgtcgatttacctgatcgcattcctttaccctttaccggatttaagcggctggttatccacccagacaagcgtagcaggtatagtcggctactattcagggttgctacctaaagaaacagtcctgacagcaagcaatgaaatagccgcctccgactggaaagaaaccgggctcaaggttatgcaagttatctggctggcaggagccggcctgttgctgtccagatgtctggcggagctgttcactgtttctcgtttacaccggaaatgtaggaaaatcactttgaacggcatcgaagtttgtatccttccggaagcggaagcctcctactcctttttcggctggattttcatttcatccgatccgcatcaacgggaaaggcttgatgacattttgatccatgaacaaacacacgtccgccaatggcattcgatcgacatgatggctggtgaaatcatctgtatcgcctgctggttaaatccgtttgcctggtggctaaagaaagagatcggtataaatcatgaatttatcgcagatgaacaagtcatgcttgccggattcgacaaaaaagaataccagtaccatctgatcggagtaaaacatcccaatacggctattgcaaatttatataacaatttcagtgtcttaccacttaaaaagagaattactatgttaaacaaaaaaagaacgaacaacgccagaaaagtgaaatacctggcactggttccaatggccgcaggcttgctattgctcaataatatcgatgcgatggcacgtgttttgaatgaaaaggtagcagaggttatccaacagccgactgctctcgccaccactactgtttccaaaatggaagcagccaatccgcttccaccggaaaaagacaagatttatgacacatgtgatatcatgccggaatttccgggcgggtaaaatgcattattgcagtttcttgctaaaaacataaaatatccgacagaagcccagcaacagggaaaacagggaaaagtagtcgtcacattcgttatcgaaaaagacggaagcatcacaaacgccaaagtgacacaggctttatatccctcattggatgaagaatccttacggattgtcaagtcgatgcccaaatggactccgggaaagatgaaagacggaaaagtcgtccgcgtacaatataccgtcccgttaacttaccgattgcagtagcctgacagtatttccctttttgagcaggacacaaaaaaggcatgcaatcttcaaaaatgctgccaggcgatatacgaagatcacatgccccacgctcctctcgaaaagggagatgtttttataaattaccacggcttacccgcagaagagtaatagaaagaatgatacaaaagtactatttttttcctttaaggcctacatgtttcgcctgatggcgccccggatcgaaattcttgcgggagccatcgggccagatgacttcggctgtcgttccttcgggaacggaaagggtggcctgtatctttttacctttgcgtttcagcgacacctctatcttgccgaaatgcgtatctactgtagcagaggcttcggtcaaagtgcccatttggggacaaaccttgaaggaacgaaaacctggagaggtaggttctataccgcacactttctgactcagcaacgtaagagggccaccactccatgcatggttgatcgtaccacctccgaaaccgtccggaccgattccccatccttcgaacaaggtcgtatattcaggataatccatcattttcgcatagcgttgcttcatcctctctaaagcaaaggccggttcattcatttggaacaaggcttcgagcacatacttttccatatagggactggcatggcattccttcttcaggacttttaccagagcaggatatttatcagcggaagctaaaccggaaacgacagccatcgcctgtgcacggtcgtccgtttctcccttatagccgggagagcgatatgctgatcctgtccaaaactttgtgtcgaagcatttccctatactgtacatcatacggccgatctcatcggcatcggctgtttttccaagttggagggcaaaagctttctctgctttcaaggccaaataataccagcaatttaccaacacgcccatatcgatgttttctccccagtcaccccagctccaatcgccgtcacgctcgataaccaggccgctcttatctacttgccatacttcgtgcagatagtggtgcattcggtcataaataccggcgacaaagctactgtcgccactataataatactgggtatagaaaccgtaccaacctaccgaagccaacatttgcaatggcaactctttccgccagttaccagccggggccggagcgaaaatcacaccgtcttcgcgttgccagttcatcagttcgtagatgcctttcagcgccagtttatggctagagggagaaagggcatagaaagcctcgcccaattcgttcacctcgtcaccccaccattgcgcccgttcgcggtccggacagtccatataactatcgcgcatcgttatatataaggtgcgggccgaacgtttccaaagttcgttcatgaacggatcattgcaactgaaagaacctgtaaattcggtatcgtaaccggtctcccggaatttcacatccagcaccttcacgccttccggcaggatatattgcatctcgtgaccgttcatccagcctaaactctcatattcctgcacgccgtcgcgcgtgacatattcagcgcggacgttgtattgagaaccgccctcatagttgtccgtccggatatggatcaccttgccggcaggagcttccactttcagataaggagtcacttggctgttataaggcagacgacaataaagcgtatcgccggcagacgaccggcggacactgacatacggtttcaagccatagtctttccataggggtaccggacgctcgaccaatttacctaaaggggcgaccccgacagacgaaataatttcggcattcggcatcttgcctgtgtagccgggctgattccagccggacatttccatcctggcatcgaaacggatattgctttccggcaaacgataattcggatagggcgcctcagtatcctgataggcatcatatacggtgcattgccagctcttgtcggaaacgatctcgacaccaggagcgacagcttcaaacagcaaggcagccagaccactgttcacatgactgaatccgcttttaccgaaatgccagaccagcacagcaatcgtattctcgccattttgcaaataaggagctatctctaccggatcgtagtaggtgtcatacggagaaggtccccgtttaagcccgccttcaaagacgaccaggcgaccgtttatccacaaccaatatttgctatcggcagcgatgcgggcggtaagagtttgcggaaccttgtctatatggacggttttacggaaagccaaccaggtgttcgtctcgctctgacaacgttccgtattgatccaatgggctttccagccagattcagcatggccggaagcgatacatccgattaacagtaacaacagaaaataatgtttcatggtattctcgtttaataagttttcacatgtgtaccagacccgactgtttccgtcttatcgccgacacggatatccgccgtacagccggacgggatcgtcacggtaagagtaactttgcctccctcccgtttccattcgctcgaaatcaagccccgtacagaatgatactcacctttcgcccaattcactctttccacgaaatgaggcgtaatcagaatatggcggaaacctggttcaacagcatcgtagttgataccagcaagctgattcatcatccaagcagagacatctcccataaagacatgattcagggaggcgtcgcggaactcaggacttaacgtccaggtttcaggcaacgtcgtatatcccatcgtttccacccaatagccccaagagggagcttccgtcttcgtaatcatcttcatagcatcctcgacatagccgtagcgggtcagcatggccggaacagacttgcttccgagcaggccgaaatcgaggaaatggttgttggcacgcacgacctcgcaaagtttatcggcgaccaactgctccttaccttccggtacgattcctaaatagagggcaatcgcctgtgccgtctgggttccttcagcatagacccccgtttcgggattgaagaacttacggttgaccaaggccttcaactcgtcggctctctgccgataaggggcggcatctttacccaacagtccggcgaaacgggccatcaaggtgtaatccaaataataataagcggtagaggtataagtgttattggtcgtagacttccagtacacccaatctcctaaaccgaaggtcaggtaaccaccgtccttctcttttgctttcaaataatccaaatagcgcaacatcgtaggatacaggttctcgatactgcgtgtctcaccataataattatacaaagcatttgggatgataaacatggcggcatcccataccgggccgggccattcaccatatccccagccgctggaggggataataccggagatctcaccggcttcgcgctggttatcaatgaagtcgttcatccatttctcatacaaggtgatggcgtcgaaacctaacaggccgaggtcgattgctacatgtgcatcggccgtccagccgttcttttcacgctgcgggcaatcggtcggaatactgtgcaggttgctacgataggcttccattgtcgccttccatatcttgttcaacaacggatcggagcaggagaaggagcctacgggctctaccgctgtgtgcatgaacagtccggtcagactctcttttgtcaggactacgggagccgaactttcaacttccacatgctggaaaccatgataggcgaatgaaggcataaagatttcctcttcacctgttcctttcagtgtgaacacatccatctggaaaacctctcccggtttcacaggatgataatagacatctatatttccctgttccagacgaccgtctgttttcagcaactctccatgcttcaaagtgatccgcgtaccgggagcacctttcacctttaatcgggacagaccggcaaaattcttttcgaatgaaaatacataaagtttatcgctgaacttcttcatcgagacaggctgcaattcttccgtaatccggatacccggcatctgctgggcggccaataagggagccggagcttccgtaacttgtaccggatcccacttgctgtcatcgaacccttccgcgttccaaccattttcttccaacgtggcatcgtatttgtcaccgctgtagatgttgttataggtatagggaccggtcgcggtacgccaactttcatcggtggcgatgacttcagtcgtaccatcggtatagcgtaggcgcaattcacagagcatccggggacggttacgccaacgggcagtctcgaaattccagacagctttggattgtacattgtgccagccgttacccaaaacggtagcgatagcgttgccacccggttttaaaagagaggttacatcatgtgtcacatataggatacgtttgtcgaaatgcgtatagcccggatcaagatagttctctcctacccgcttaccgttgataaacaaatcgtaataaccagcggcagccacatacacgcgggcttcttcaatctcttttcccaatgtaaaagctttgcggaacataggagccggctcgaactccttatcgtgactgtcggttatccattttcccgaccagtcggacgacttgaatttggcagtctcgaaagtagccgtttccgaagtctcgcaaatgtctccatcctcatcccataccgtcacattccaatagtaacgggtatgcggttccaatgtcatattatcggtatacggttgcaggttatccggcgaggtcccgatacggatttccgaacgggaagccaaaaagttcttctcacttcctttgtattcccaagtgaaacggggacttttcgtatccaaaccgatcggttcgcgcaggtattctgttcgcaggttcaccggaaccgtaagctcgtttttacctttgcaacccatcagcgagaagaaggcaagtgagcagatcaacagcgtgtttttttttaccatatctttatctgatttgattatcgtacaacttttacttcggacggagcatcgatccgactccgtactttcccgtcagcgcctttttcgtgacggatagtgatcacaccgtaaggagtcgggaacgttccttccacccactccaagtcacctaaatgcggtgtgatccggacaacgcggcaacccggctccacaacctggacacccaacacatattcactcagccaggaagtcggaccagaagcccaaccgtgacaaaggctatggcggaaacctttataacaataagccccgtaatcgccatgaatatctttcttgcctaccggaaccaattcatcgatgcgagaagcgccgggcaaccagtctaagttgaaatcttcccaaaaagtagttgcacccaaatcgagcatcgcaccccagaattggcgtatcacgtcgatcgccccttgataattgccggcagcagccatcgctcgaagcatataataaccataaaaagtagagaatccatgccctccattaactgcgagatatctccgatcggcctcttccggcttcatcagtccggccaacgccaacagggaagccgcctgtttcgatccaggagcatccggagcaacacctgacttcaggaaaggttttatcaccttcgaagcggccttggtcatcctgtttcctacagcctcacattctgccgccaacgcatcttcgcccaacaccttacaaagttcgtttccggctttcatcgcctgtagcatcaaggcttgcaagccggcatcgatggcaaccggattttcactggacggccaatcgaggaaacgtcctcctccgtcgagcttctcgacgccgtcgtcaccgactttggagatcaaaagacggagcaaaccggtcaaatagtctttctgttccttcaagtaagccaagtccccctgatagtaataccagtcgcgctggatcagcaaccaccagatggagtaactgcacatcccgttcatccagccaggcaacggcgttgcatcgcggataaaatcaaggcttttcggtatcacctcgttatatccgaaaacagtgttgaccgtcatcacttccggatgcaaatcaccaatccagaccaaacggtcacgtttgatgccgtcccaaatatactcctgcatattcaaatgtaccgtataagcaccagtctgccaaatccggttcagccgttcgtcgttgcaacgaaatgagcctttatatgggatgtcccgaaaaacggaaatggcacgtatttctttaatatgcaattcgacggaatcgtccaaaagatcaatccgagcaaaccgaaacccggaattacccacttccataacccccaaccagggtaggcgaatagtaaaatcgcgcatggcatgatcgttggaagcaccgttcaccccatctatatcgcacatggcttcacttaccgactcacccaaacggatccggacggcgactggttcgtgcgaagccggcatgccggttactatttgcaagccgccttgcagttcttttccaaaatcaagaaggatggcaggatgctgccggtcggtgctcgaaagcttacagatgttatgattcacaagattggattgtccgtttccagaaagaagcaaatggtttgcgccctgtatcaactggctttcctgttgccagacgatgcgtgcgggaggtagatattcgcgtacacgactatcgcgctgccgggcggacaatgatacggcaaagaatagagatataagaataaataatgttttcatggtatatggtatttatatgaatgatgatttaccggtgtagtgacaaacaaagctatacctcgttgctataaacacacctataaatcatcatttacgatcgtaacctatcacaaaccgaaggccggaaccaaatcatccaactgcttgtcagtcatgccggcgggttcgtatcctgccatgcgtgcgctgaaatagatttgggcggacttgcttagcgtgtcgattgcgtcaaaacattcgatcaggtcttcaccgactgccaaaataccatgtttttcccagaatacgacatcgtgcttttccaattgtttaatggttgcacgtgctaaatccagtgtcccaggtatttcatagggaacaataccgactcctttcgggacaatgatacgacattcgggaatcatgctccacaacgtacgggtgatgacatccgaatccaagaacggtttacaatgcgtcatgccgatcaggtcggtcgggtgcgtatgcaaaacgactctgttatcacggcccaggccacgcagataattatgcatcatcaagtgcgaaggcaactcggaagtaggcaaaatcaattgttcagcaataatatcataactttttccatccccggcgatacggatcagggaaccgttggccaacggttcctgtgctacataacgcatccgctttcctgtaccggtgacatagaaaatatgtccggcaagagcggtcatcgcttcttgtaaaggaatagccggtcccagtgcgggaagtgctttttcgacatcgttcatcaagtcggtcaggtttacggaaatgttaccaccgttacgttccgcccatccttttgtccaaagatagccggccacttcagcgatacggccaatctcggccatcaatttttcattgtttctgattgttttcattttacttatatatcttttttatgagggacacgcccccagctcaaaattgttcttcacccggcaaaaaacagacaagcacgggagcttaatttcatacctatggaaattaagttccatacctatcgaactaacgtcccatgcctatccatttccaatccgatcattatcttaaatcaaattaggcagcaaaagtgagaatatcaggagacacatgccgcaaaccaaaacgacgatcgtctgccggctcacccctttccactctttcaagataatgccccacacattgctgaagatcacattcagcgacatcaagatgctccatgaaaaggccagcatcaccggagattcggcaaaatagctctttcccattcccaacccgaagaattgcgaataccacaaaacacctgccagcgcacaaaataagacattattcagcaaagtaccgcctgatacggagaaataatctctccccgtctcgttccttacattctggaaaaggcaataagaggcgttcgtgataaaacccccgatcgtcaccaacaggatgaccggattcagtgcgaacaattcgcttgcgccggactgtttcgctttctcaaggatcggagcgccggattccaggcccagattgaagcaggcactcatcacaccggccaaaagagcgacaagcaaacctttcgtcaacgcgaaatcctttacagccgctttcttttcctcctcggtcatattatgggcgcgaagacttccagcatacccgatcacggcgataccggcaagcgtgatacacacaccgatcagcaagaccaggccatcgccatggaacaaatccgttccgccaaaaactgccgggaaaagcgtcccgaaaccggcacacgttccaagcgcgatactctggccgagcgcaacccccaaataacgcatgctcaacccgaaggtcaacccgccgatcccccacaggattccgtagataacggcccccgcagctccgccggcactccacagttccaagaggctgctcccattgggaatggcaagctgcgctcctaagaatgggaagacgagccaggcaaaaatgccttgcaccaaccaaaaactttcccaactccaatccttgactttgttgatcggaacgtaggaactgctctgcccgaaactaccgattgcgattatgatcaatccgatgattatttccatatatgttatttttagagggcgaacctgtgtgttcgcccctaaggttaacgtttacttgttacttccgcttcgtatttttctatctcggcgatataatcctcacctaccgggacgtcgttttgcaggcagaacatatcccaaacggctgtccacggaaggctcttcatttcctcctgcagagctaaacgctggaaatatttaccttcggcttcgtactgctgcaaagttgccgacggttcgagaagggcttgcataaaggccttctgcgttgcacggcaaccgatcacgtacgccccgatacggttgatcgttgcatcgaagtagtccaagccgatatgcacacggtccaatgccttgcaacggatgatttcgcgtgccagatcgagcagatcgtcgctcaagatcaccacatggtcgctgtcccaacgaatcggacggctcacgtgcaacatgatctccggtgtaaaaagaagcagggccgaaaccttgtcggcgatactttccgtcagatggaaatggcccgtgtcgagcgtcacaatcttattcttcttcgcaccgtagcccaagtaaaaatcataggaaccgaccgtataactttccagaccgatgccgaacagttttgcctcgatacaatccttcatgttcttatattcagttgcaaaaatctcgtcgagcgactgttccagtatctgacgatatttgagacggctggcgggaacttctttactgccgtcgtgaatccacaggttcataatacagggatcgtcctggtatttgcccatctcctcgctgatccagcggcagcgtttcgtatgttcgatccagaaattgcggatcgcatcgtcgggattcgccaacgtcaggtcgccgctcttcggatgcgaaaaagaagtgctgttgaaatccagcttcatcccgttctctttcgcccactgcatccagctctcaaaatgagcaggttccacttcgtcacggtcgaccttcctgccctggaagtcgccatatatttcatgcaggttcaagcgatgtttaccagcgatcagagaagccgctttcaagacatcggcacgcacttcgtcgatcgtgcgggcacgtcccggatagttgcctgtcacctgaattccgcccgtcagcgaaccgccctggttctcgaaaccactcacatcgtccgcctgccagcaatgcatcgaaagagatatcttctgcaatttgtccattgcctcccttacatccacaccgacagctgcatagcgttcaacagctgcctcatacgcttgtctgataatgttttcttttgtcatggtcttatttttttgaggttacagatttatatttcctaaaagcctcttcccactctccactaccttccggcagaaagacagccggcgaaaggaaagagttgatcaaacggcgcatctcccaacggtcggccaccaatcccgccgccctcgcctgcaccatgcagttgccgattgccgtcgcctccgaaggccctgccacaaccggcatgtttattacatttgccgtaaattgattgagaagattattcatcgagcctcccccgatcacatgcaatttgcggatcgggaaaggagccatttcggataacaatgccagcacctccttataccggaatgccagactttcaaaaatacagcggataaactcgtcgtcctcgaccggttcgggctgctccgtctcgcggcaataagccttgattgcctccgtcatgctcggcggattggcaaaacgcggatcgtcaggattcacaaaacgacggaaaggcgtcgcccgttccgccatcttgactatcgccggataggaatagtcgcgcccggccttctcccactctttccgacactgttcgagcaaccacatcccggtaatatttttcaggaaacgggtcgtcccgtctataccgccttcgttcgtaaagttatgcaggaaggattcttccgagataatcggttcttccgtttcgatccccataaggctccatgtgccgctgctaagataggcaaactcccggtccgccgccggaacagccgcgacagccgaagccgtgtcgtggccggcaactgctatgaccggcactttgccgatccccgtttcccgtgcaagcgcatcggtcagctccccgacaaaagttcccggcatcactaccggacgcataatggacggagctacccctgccgcttccaacaaggacgcttcaaattccttcgtcaccggattcaacagtccggaagtggaagcatccgtatattcacaaacctttttacccgtcaacaggtaagaaagcagatcgggcataaacagtatctcttcggcagcctccaacggcccgaaaccttcctttttagccctgaataactggaaaacactattaaaattcatgatctgtataccggtaagccggtagacttccgaccggggaacacgctggaaatattcttccggcgcaccgtccgtataaggatcgcgatacgcacgcggtagccccaacagtgtgccgtcttccgccagatacccgaaatccaccccccaagtatcgatcccgatagagtccgggagcaggttccggcgtgcacaaatcgtaaggctttctttcaaggcatcatataaccggtatatgtcccagtaatatttcccatgcaactccatgatcgcattcgggaaacggtgaagttcctgcatttcaaatttgtcaccaaccaaagtgcctaacacggcacgtccactggtcgctcctatatcaaaggctaaaaagttatatttcttcatggtacaacaaagttgtttgttttatgattgcaaaagtaaacggtaaattactatctttgcttttgaaaatgattttaaacctttcaaatctgacagaggagatggagaaacgactaagcgatcaattgagatacctgacgataagtgcgatagacgaagagtggggaattgtcgtcacgaccgtcggttaccagtttattcccccgaaagggaactatcctctttcgaagcatccggacaattataacttcgagccacagaccggacgaatcctgaacgaataccaactggtctatatcacgaagggaagcggttacttctcttcgcaatcctgcaagatgcaaaagataaacgccggcacgatgatcctgctttttccgggagaatggcacagctactatcccgacagcgagacaggctgggacgaatactgggtcggtttccgcggtgtccacatcgaccggcgcgtggaaaaacgcttttttacccgcgaggaaccgttacagcacatcgggctcagtgcgacgatcgtcggactatatgaagacatactgaaattcgcctctcaggaaaagacgggctaccaggagatgatttcgagtatcgtccttcatatattgggtacggtctattataaaagaagaaacaactccttcacgaatacctacgttgtggataagatcaacgaagcccgcatcctgatgaaagagcaggtggaaaacccgctgacaccggaagaaatagcttcccgcctggggctcggctactcctggttccgccgtatgttcaaagaatatacaggcgtatcgcccgcccaatatcaattgcagcaaaaactcctgaaggcaaaggaactgcttaccagcagcagcatgaatatctcggaaatagcctacagtctcaaattcgagaatgccggacagttctccaccttcttcaagaagaaagagggcgtgacaccgtcggagtttcgtgaacgggcgcactgaggaattaaaaattaagaattaaggggtgagttggaaggtgatttttttgttcatcatatagttgactgcaccatagataaacaatcctaagaactgggcgagatattcgttcaagtcaaagatttccaccatgataagcaaagcgaggaattgggaacaataagcacatccgaaagcgatcagaaaaaggggaatctcacggcgaaacttaccggtgcgggatgaaaatatccaatatttgctccagaagaaattattgatctgcgcaatcacataagcggtgatattggtagcgatatagttacaaccaagcttgtccatcatcagccagacaatcaagaccgtaattaacgcattcagcgtaccgaccagtataaaccgcatcacgcgcaccatatttttagattgtatgaccaagtgtatttcttgctgttttgttctttgatatctgaaattccggtacaaatatacaggataatatgcaaatatccatgcaaaaagtcacaaagtatggcgaacaacccgtatctttaccccatgaaatatttattgttttacataatcagtctgttatctctcaccgcctgcatccacgaggaattgccgcctgagggtggctttgctttggaggaaggcgacccgttacccgaattcagcatttccaatccggatggaacggtatcgaaaaaagacttggaaaataaatttgccctgattattttcttcagtacgacctgttccgactgccagaaggccttcccggatatttccactttatatcatacatacaaagacgatccctccgtctgtgtgcttctgatcgcacgtggagaaaccgaagagcaggtagcggcctatttccgggaacatcagtacaatatgaagtttttcgccgatccggacctgaacgtctactccctctttgccgacaacaccataccccgcgtattccttgccgacaaggacggtacgattatcctgacgcaaacggaaaaagtagatgcgggattactgatatcgggcggagtagaaccccacccctacaagcctgaaaaatcttaacatttaatgctcaactgacgtaatacatcacgaatcttttcgaatgtggtgatacgggtcggaaccaaaggcaagcgtaatttattttcaataaagcccatcgcattcagcatgctcttcgctcccgccggattaccgtcgataaacagcaaactgaacagctccgtaaaactatggtggatcgtgcgggcgctatcgtagtcaccagccaatgccagacgcaccatacggctgaactcacgcgggaaagcattgccgattacggaaatcacgccgacagctcccaacgtaataagcgggaaggtgataccgtcgtctcctgaaatcacattgaagttcgccggtttgttcttgatgatatcgtccatctgggtgatattgccggaagcctccttgactgcaatcacgttcttgaactcacgggcgatacgcagcgtagtctcggccgtcatattcacaccggtacgtcccggaacgttatacaggactatcggtaacgtagtcgcctccgcaatcgctttataatgctgatagattccttcctgggatggtttgttataataaggtacgacagacaggatcgcatctataccgtcaaaattatcgtttttcaacttctcgacaaccgaacgcgtacagtttccgccaacccccaacacgatgggaatgcgtccgtttaccttcgtcacgaccaaattgattatatccttcttttcttcttccgtgagtgtaggggtttcagcggtggtacctaacacaaccagataatcggttccattctgcaactgataatctacgagccgggccaacgcctcatagtctacactttcatcttctttaaagggagtgatcaacgccacacccattccttttaaatttatgtctgccatgataataattgtcaattgtcaacggtgctgcaaaaataaggaatttatatcattttgagcgtatcgcctgcaaataaaataatatatgttcgaataaatgcttgatatcttcacgctctgttactgatatggacaaatcatacaaatctatatcggcatgcttcactcccaccttgaatctgcaaggatgctgtagcataagatattgcatcgggtagcaatcggggcgcgtaagatcgatcaggatatccgccttgaccgtcttgaaccgttccagcacgacatcggaaggaacctgccagacgttcacatccttcttggcatggaccgggatgcacgaggcatctgcctccggatcgccggttacatagacacacgcctgcaccttcttgttcttcttacgcaggacgtccagacaaggctcgacaagctcgcgatcgtttgcctgataaaggaccaggatatggcctgcgtcttccagcgcacaaaactcatgcttgcggccggcagccccggaagctaaagactgcactttctttttaataaaataattcgtcagtctcattccgctatcatatttaagaattcgtcttcgtttataatcttcacacccaacttggccgccttttcgagcttggccggtcccatattatctcccgccaggatataatcggtcttaccggacaccgagccgctgttcttcccgccatgctgctcgatcatggccttgtactcgtcacgggaatgcttggcgaatgtcccgctgataacgatgctcaagcctttcagcttctcggaacggttggccagcttttcttcgggcacggacatctgcaacccatactccatcaaacggttcaccaacgtcctgttacgctcgtcggcaaagtaagcgatgatacttcgggcgatccgctcaccgatctcgtccacggcagtcaagtcttcgaaagaagcctgttccaactgctccatcgaatggaaagcggataccaggcgttttgccaccgtttcacccacaaaacgaatccccaatccataaagtacccgttcgaagggaacctgtttggattcttcgaggctcgccatcaggttacgggcgctcttgtcagcccaacgttccaagcgcagcagatcggctatttccaacgtatagagatcggccgtgtccttgatatagccggcttcgtacaaatcttcgactgtctccggccccatattgatgttcatggccctccgggtgacgaaatgctcgatcttccccttgatctggggaggacagccggcttcgttcggacaatagtgagccgcttctccttcaggacgcatcaacggtgtcccgcattcgggacaagaacggatgaaacggaccttatcgcccaccagcaaaccgcgggcttcgacatcgacaccgacaatcttcgggatgatctcgccgcctttctccacaaacaccttgtcacccaaatgcaggtcgagtccttcgataatatccgcattgtgaagggaagcacgctttacggtcgttccggccagcaataccggctccagattggcaaccggagtgacggctcctgtccgcccgacctggaaagacacggagttaaggcgcgtcacggcacgttcggcctggaacttgtaggcaatcgcccaacgtgggcttttggccgtgaatcccaaattgcgttgttggcgcaatgaattcactttcaaaacgatcccgtctgttgcaaccggcaggttcttgcgttcgacatcccaataggcgatataatcgtatatatcctccaagctgttgcatacgcggatcacattcgggatcttgaacccccatgaacgggccgcctccaaattatcgaaatgcgtttccgccggcagctcctctcccaacaaataatagaaataggcatccagcttacgagccgccacgacagccgggttctgttgcttcagcgtacccgaagcagcattgcgcggattggcaaaaagaggctcctcctgttcttcacgttccttgttcaagcggtcgaactcggcccagggaagcaagatctccccccttatctcaaatgttgccgggtaccggtcgcccatcagtttcaaagggaccgaacggattgtcttcacgttggccgtcacatcgtcgccacgtgtcccgtcgccacgcgtcacggctcggaccagacgtccgtcctcgtatgtcagggaaatggaagttccgtcatatttcaactcggcaacaatctcgaaaggctcgttcaggtcacgggctatgcgctcgtaaaaatccttcacttcatcttccgaataggtattgcccaacgaaagcatcggatatttatgcactacttgttcaaactctttggaaaggtcactccccacccgctgggtcggcgaatgaggatcggcatattcgggatgcgcctcttcaaggacctgtaactccttcatcatctcatcgaactcacggtccgatatcgtcggtgccgagagcacataataattataattatgttgctccagcgcttcgcgaagtgcttttattttatcttttaccaccattttttcagttgaaaggtgaaaggtgaaaggtgaaagttgaaaagaaaaattcatcactttcaactttcacctttcaactttcacctaatatattagttctacattatcaatccacatcgtattgcccggtgagccgatataggctccgccgtggctggaagtaaactgcaggacgatatgagtcggcaattcaccttccgccgcccagcccacttcctgaatagggacgcttttaccctggctgttcaaggcataacgctcttccacctgaatccgcatataaggcttatactccggatgcttcgtaatatcgccgtacaagatagggtaggtcgcatcgttcacccaaccgttgctggattccgtataacgctgcaccattgtcccgacacgtttggaataaatatttccatctttatcttcccaacgtttctggagcaaaagaatggctgcgatcgaatcctgtccggcaacggtcgtcttgcggctgaagccggtactgcggatacgatccttttccggagccagcttcaccttatagtcaaaacgcaaagccttcggcttcttggtaaacgccactccgctgttcaacatggcctgcgggttcttggtccccttgatcggttcgtgcaccgttccgaggaaaacagaaccggcggctaccacttcgatatcaaccaagccgaaaaccttcacactttccatgcgtgtctccagacgtgcacaccaaccgtcatcccgtctttcagggaagacagatgtattcgtcttcaccacacctgccaccttcgccatcacgttggagttcgcccacggcgaaccgccccggttcgtataggctgtattgccgatgatcgtatctgtcggccccagctcgtaaagatgcttcgtatttcctccaataatgccggattcatgtatctcgcgaacgacccaatgatccatatctccaaaactgaacggcactacgtgctcttgggaactgacaattgacaattgacaattgacaattcccaagagaaagaggaattttgctttctgtttcatttcaaattctgttttttctaaaatccctaagtcggcaaagccggcagagccgacaattgtcaattataaagaatatccccactccttgagagccattccccaattttcttccacaagccgtaccgtgcggtcgtcatacttgtattggttcttcttatagcccttctttttcccgaggtatttctcgatttcagctttagactcttcaaagccggggaggtttaatttcttgtatatatcctctgtcatggcgaaagcatcctgttcgaaatcctcaaacttcacctctaccaggtttccttcgggtatcagatgcttttgttcttcatatttatagaacaaacggcggtatacttcgataaaattgctttcgatctgctcgttggagatgtcctgcaagcggagcggctggatcgtattggtaaagaagctgcgcgtgctctcgaacaccgtatacggatttcgtttcagatagataaatttagcattcgggaacatttccaccaaagtcttcacacgtcccgtatgaggcggattcttgctcaagaactgacttcctttcgtattccagagggaaatcttgatcagtttgaggaacgtttccttaaacacttcccgctcgtgttcgctgatattgtcgaaaagcagataacggtcgcaatattcgagcatatgcttcgggaagaaccagaaattataatacgtgtaaggcatcatatttgccaaggcaaattcctcttcctggggaagatccaccttcaactccatattatcggtcggacgcttgtcgggcatcaagaacgccatgttcttcttgaagaaaggctgtccccaaagcatcaggttcggaaatacggtctgataggtcgtattgtagccgaaatgcttgtcacacgagaagacattgtgcatgaatgtcgtcccgctacgccaatgtccgagaatgaacaccgggtccatctccaacggcttgtccgcaatcttacggtaacgcgcatcttcgaagggttgcaacaggctgagcagacggcaaacggatttagtcaggaaatatttattacgaaatcctttgtcgatcgttttattggctgtcacagccttgaacgttttccagtcagcacccactaaagtattgatcggtagtttgtcaaattccagtaatcccataccttatttattttctgttatacacttgacggaaaccccttgccgttcgagctctttacaaacggaacggatagcttcgtagtgctcggggccgatacccaattccggaagattcagtacagccaacgcgtcttccgtcaccatgtcgcgagcatctacccggtcgataatcatgccgacagccgatgtattgttcgtgatcgggtcgatcaggataaaggcgcctgtctgtttgttcttctgatacggatcgaagaacagttcctttccggtcgtgaagacgacacgggcgatctcgttcagcttcatcggcaaatcgtcagttgtcagttttccattgtcaaccgacaactgttccatcgtattgacattcactttataacggatgctgtccacacgggcgcgtgtaagattggtcgtatgcttgatataaaactgcttgcttgcgtccatcggttcttcgtccatccacaccagcatagcctcgaagttacggtccgcaatcggcaggttatccggatggacgagcatctcaccgcgtgaaacatcgatctcgtcttccagcgtgatggtgacgcactggggagggaatgcataatccagctctccgtcgtatgtcacgatacttttcactttggatgttttcccggaaggtaaagccatcaccgtatcgcctttacgaacgataccactggccactttcccacagaaaccgcggaagtccaggttcggacgcaggacatattgcaccggatagcggaaatcctcgaagttgcggtcctggtcgataggaaccgtttcgaggaagtccaacaacgacggcccttcgtaccaaggcgtacggtcgctcttctccaccacattgtcgccatccagagcggacagcgggatgcaggtgatatccgggatattcaacggagcgacaaactccttataatcggaaacgatcttgtcgaaaatattcttgtcgaaatcaaccaggtccatcttgttgaccgccagcaccacatgcttgatacctaagagcgaaaccagataggtatggcggcgcgtctgcgtaatcactcccgtgcgggcatccaccaggatgatggcaaggttggcagtcgaaccgccggtgatcatattgcgggtgtactgttcgtgtcccggagtgtcggcaatgatgaacttacggttattcgtactgaaatagcggtaagccacatcgatggtgatcccttgttcgcgttcggctttcaggccgtccagcaacagagcgtagtcgatatggtcgccggcattccccatgcgcttgctgtcgcgttcgagggcatccagctggtcttcgtataactttttgctgtcaaacaacaaacgaccgatcagcgtcgatttgccatcatccaccgatccggcagtcagaaagcgaagcaaatccttttgttcatctctgtcgaggtattcttttatatttaatgttgccatatattttaagttgaaaggtgaaagttgaaagatgaaaggtgaaagttgaaaatagtgacacgaagccactttcaactttcaactctccactttcaactaattaaaaatatccttctctctttttctgttccatgcttgcctcctggtcgaagtcgatcacgcgtgtcgtgcgttcgctcttggtcgtcgtcatcatctcttcgacgatcttttcaatcgtgtcggcattgctttccacagccccggtcaacggccagcagcctaaggtacggaagcgtaccatgcgcatcttgatttgatcgcggtactgctccggcagacggtcgtcgtctgccatgatcaggttgccgtcgatctctacgcacgggcgttccttggcaaagtacaacggtacgatcggaatattctccaggcggatatactgccagatatccagctccgtccagttggacagcgggaacacacggatgctctcccctttatggacacgggcgttgtagatgtcccacaactccggacgttggttcttcgggtcccactggtggaacttgtcgcggaacgaatagatacgttctttcgcccggctcttctcttcatcgcgacgggcgcctccgaaagcggcatcgaacttatatttatcgagcgcatgcaacaacgcctgcgtcttcatcaggtccgtatgcaccttgcttccgtgcgtgaaaggccctacaccggcattgaatgcctccatattggattccacgatcaggttccatccgaatttcttcgcatagtcgtcgcggaactgaatcatctccttgaacttccatttggaatcgatgtgcatcaaagggaaaggaacttttcccggagaaaaagccttttctgccaggcgaaccatgacggaagagtcttttccgatagaataaagcatcacaggattctcaaactcggcagctacctcccggatgatatggatagactctgcttccaactcctgtaaatggcttaatttataatctgacattgtatgttatttaatgttgttattattcttacctttctattctaatatagttccatgcccatgaaactatgtttgcatgctgcaggaacaaaaattccatgccggggaaactattgtttcccgccaagggaaaccttcggcaatatcagttcgagcaaacgggttacggattcctccaggctcaacacggaagtgtctaacgtcaggtcaggatgttcgggtgcttcgaaaggagcggaaacgcccgtgaaatccttgatctcgccccggcgtgccttcgcatacaaccctttgacatcgcgccgctcgcactcttcgatcggagtgctgacatatatttccaggaagttctccttcccgacaatagatgccgccatttccctcaaatcgttattcgggctgataaaagccgctatcgtgataactcccgtatcgataaaaagtttgcttacttcggcgatacggcggatattctctacccggtcttcagccgaaaagccgagattgttgttgatcccgctgcggatattgtcgccgtccaggatgcggcacagcaaaccgcacttgtgcaactcgcgctcaagcgctatcgccaccgtgctcttcccggaaccgctcaacccggtaaaccacaccatcacactgcgctgcttcaacaaacgctccttatcctcccttgtcatcatcctatcgaaaataggatagatgttagttgaaagttgagagttgagagttgaaagtttctcttcgatattattattatttacttgttccattcatattttgtttacttgttttcacaatactgaccgtcagtttaatcaattcacggcagtcttctataatcgattcgtattctttttcagataaataatccgtttctttcaataacataatccaatattccgtttcatttgcttccttcaaagcaatattcactttgcttataaaatcggctttggactgcgcatgctcagcttctttcaaaagggcaccaatggcagttccactacgcaacatctgttttgacagaacaaattcttttctttcatataatatcttatatagtctaacgatacggatcgcaaaaccaaaggacttttctgccgtcaaactcttccccatcactttcaactttcacctttcaactttcacctgtttagaatttccagatcatcggtatcacgaacaccgagatcaaaaaagtgatcaggttaaggggtaaaccgattttcacgaagtcagtgaacttataactaccgataccttgcacgatcagattggtctgataaccgatcggcgtactgaaactggcagatgccgccatacagatcaccacgaagaacggcgtcgggtccacaccgagctgcgtagcgaccgacaaggcaatcgggaaactgagcgccgcagccgcattgttcgtaatcagttccgtaaagatattggtgatgataaagactatcgccagtaaagcatacggtcccatgctgctggacataccgataatatgacgggctatcaaagctgcgaaaccggaattctccatcgccttgctgatggcaaaggcacaggcaatcgtaatcagaatatcccaggatatatatttggtatactttttcggagggaaaatcttggtccacgccatgatgatggtcgtaatgcagacaaagaaaaacatatccagccgtatttcagggaacgcctctttcaccacaggcaactcccctatcgtggcgcctacgatcataaagatcagcaagcccaatgccagccagcgtttcttgcgggaaacaggttccgtaccgtccttgccgttggcaagcaaaaggaagacgctggattcgccccatgtcggcacgaacgtatcgtccgcccaaagaaccagcgtatcgccctcgtgcaacgtcaccttatcgagatcgcgggtaaaccgctgtcccccgctcttcacctctttcacgatcgcaccgtaatgacgggtaaaattgaactcgcccaatgtcttgttgatacccggaaaacgggagcctaacaccgcttccacccggtgcaggttaccggggttgccgtcttcctcctcttcctcgtagcgatcggtgcgggaatcgggcagcagcttgttggagaacacgaagaggtaaatgatgccggccagcgcgataaagatccccacccttcccagctcgaacatcgtaaacccttcatatccggcatcgaggatcatgccatgtacgaccaggttggtcgatgtcccgatcagagtacagatgccgcctaaaatggtcacatacgaaagaggaatcaggaatttcgtcgccggcagcttgaccgactccgcccaacgcttgatgataggagcgaaaataacgacaacaggcgtgttgttgagaaaagcggatacaaaagcgacaggtggaagcatacgcaactgcgccttgaaaacggttgtcttcccctccggcaacaacttctttataagttgtcccaatgctccgctctggcgaataccctcgcttaccagaaaaagcattccgacggttatcatccctttattgctaaaaccttcgagcatttctttcggcgtcaatattccaacacagaggaacagcaccacaaccgtgagtaacaccattccgggcctcagcccatcccatatcaacgccccgatcatgccgaccaatgccagcaatacaaatattatttcaaagttcatcctttcaattgacaattgacaattgacaatcgacaattaagaacagagaccattaattatcaattgtcaattatctgttagggttgcaaatgtaataagaatattaaatctaatcttactacgataaccaattttagggataatcttgcttacagaccaaaagtttcagcaaacggaacaaaccgcccgtcagagcggtttgacgatgaaccacggattatgaaggtcttccttattgtactttaaaggtgttttgccatcgatatgataaacttcgcatccggccgcccgtgcaatcgcatgtccggcggcggtatcccactccatcgtcggtgcgaaacggggataaacatcggccgttccttccgccaccaggcagatcttcaagctgctgccgctactgatcagggtgaccggctgtccctgcttacgcagattctcgataaaggccgtcgtttcttccgtctggtgcgaacgcgaggcgaccaccacgactccctggtgtcccatcggcataggcaggcgtatggctttcgtttttatctcgtccatcgaaggctgatatccgtagtctatctccgccagcttgaacgctcccaacgagtcagccgcgaaatacagctctttccgcacgggcacgtagatcacgcccaataccggaaccccttccttcacaagggcgatattaaccgtaaattcgccgtttttcttgataaactccttcgtcccgtccaacgggtcgacgatccagagcatgtcccagcctgaacgttcggcaaaaggcttctcttttccttcttcgctcaacacggggaaaggcgtcacagacagggccatcgagataatcgcatgggccttcttgtcagcttttgtcaacggggagttatcggctttacgttcgatgccgaaatcggattccggatcagtataaatatccatgatcgctttgcctgcatcgagggcggcgcgaatagctatatacaggtaatttgcataattattcatcatcacttattcttttagttgtgttaatatacaaatataatcaatttcctcgaataatccgaattttaagccctcattttcactcgatgtccaaaacatatatgttttgaattcaaatcaccggtgtttcgttttcaaatcaccggtgttttgaaatcgaaccggttgttttcgacgatggatcggccgacggcatagccttcgtcatacaaggcggacagcttcttgcggtcgttggtggtgcggccgacttccattttcttttgcggacggatgacgatcgcgtctcctttcgcttccagctcgtcgatataatccagcacttcgttatagttgcggtagcgcagcttcaactgcttgcggatagcgggataccggcggtagatgaagccgggcagccagaagtccttctcttccttacggtagcctttgttgcgggtcaggataatcacgttcttgcggaaaccgtcatcgatggcatgccggatcgggatggcatcgcagacaccgccgtcgaccatcgggacaccatcgacatacgctaccggacaaagcaccggaagcgtgcaggaggcacaacagatatcgaccaggcggtctgcatcctgcttctcctcgaaatattcggctttacccgtcaggcaattgctggtgaccatgacgaagcggttcggcgacttgaaatacgtctcgtagtcgagcggataatatttttccggataaatataaaaaaggtatttcatgtcgatatatccccgcccccggaggaaatgcctgaaaccgatataatcatatttttccagcaggtcgatattgctgaaacgggaacgcccgcgctgccgggaggcatacgaaataccgttgctcgccccggcggacacaccgatcgtataagggaaccaaatgtcatggtccataaagcagtccagcactccgacggtgaagatggcacgcatccctcctccttcaagcaccagacctgtgcgactatctatatccatatctgtttaccataaaaataataaccattgcctggctcacaccggacaatggctacaaaaatataataaatcagcgatataaacatcgtctttttacagaataacttcgttcaccaaaggacggtggcagcggaagtcttcgatattctgaagggtggtctctgcaatgttatgcagggcctctttcgtgaaaaaagcctgatgcgaagtaacgatcacattattaaaagaaagcagacgggccaatacatcatcgtcgataattttatcagacttgtcctcatagaagtattcgccctcctcctcgtacacgtccagaccggccgccgcgatcttcttttccttcaggccttcgatcaggtcgttggtgttgatcagttggccccggcctgtattgatgatcattacgccttccttcatcttgtcgatggagtctttgtcgatcatatattttgtctggtcggtcagcggacaatgcaaggagatgatgtccgactcgcgatacagttcgtctaacgaaacataagaaataccttcttctccggcaaacttcatgtccgggtaaaggtcataagccagaatgcgcattccgaaccctttcaacaggcggatcaggatcctggcgatctttcccgtgccgataataccgatcgtcttgccgtgcatatcgaaccccatcaggccgttcagcgagaaattaccgtctcgcgtacgccagtaggcacggtgtatcttacggttcagcgacagcatcagggcaagcgaatattcggctacggcgtaaggcgaataggccggtacgcgaacgaccggcagctttcctttggccgctttcagatccacattattaaaaccggcacaacgaagggccagcagtttgacaccattgtccaccatcgcatcgatcacagcggcatcggcggtgtcgttgacaaagatacagaccacgtccgtatcttgcgtcaggactacattgttcggattcaaatgtcctttgtagtaacgaatgtcgtaattgtacttttcatttactttgtcgaatgaagctatatcgtacggtttagctccaaagaatgcaattttgtatgccatattatttgtttttatatctaacaatcaaaacggcctaaatgttgaaaagaaaaggtgggtagtagaaaaggaaaggtccggctaaagagtgcttaaccggacctctacccatatatagtttttataatgaagtatatcgttcagccttcctttgaagactgtccttttttattcgcagctgcattacgcttattatcccgatgaataaaaaagccacctataataactgtcgataataagcacatccccataaaccacatcatattcataatattcatacagtctctcctttctgttttgtgtttgtgttatctaataaaacaaagatagccattctttccatccgtccaagcgtaacaatctaaaatttacgggaattcgatttccaccgtcgttcccttcccgacctcggacgtaatcgtgatttccgccccgtagcttcttaggatacgcatggaaagactgagtccgataccatgcccggcgaactcccgtgtgttggaggcacgatagaaaggttggtacacacgggcgatctcctcctcaggaataccgatccccatgtccgtaatggtcaggacagaacctttcagctgcatctcgacaggcgcttctcccgaatatttacaggcattattcaagatgttgccgatagcgatcttcagcagatgcggattcgcctcgatagcgaaagcgaaatggtcggttgtaaaacgaacgcggttacccacgaactgcatcaggaagtcggccagcaaaaccgtctcacgtgcattcttcaggatctccttatccccatgagagagaaaaagcaggttcttcatcaataggatgatgcgtttcgtttcggaagcgatacgccccaatgctgcctggtattcggccgacgtacgttccttcagcaagctgatctcgcattctccctggatggccgtaagcggattattcagttcatgagatgcattgctgataaaagacttctcactctggtaagccgcatcgatacggtcgaccatgcgggtcgcatacaaacggccgacgaaatagaccagaacggcactgatcaccagcatccccagcaacagccagccgatccggtgctggatatccccgccgtactggttgctcgacacaaccagtacgataaaattgccctcattatccggatagtagacagccgctcctaattctttcccttcatggaaacgaaccacattgcctgcatacagggaagcgatcttctcatcggtcaggtaacgggacaagacgctatgcgcttctgcgatgctgtcggcgttcagcaagatttccgctgcaacaggcaacgtctcctcataatgctgctggatacgggcataatcttcctcgtccaactcatccttctcccaatgcttctgtgccgtcgcgtatgccttctccgtcagataggaatagtagagacggctgatatagtcggtcgccacaaaatagaaaacgactgtcaccaccgaaataatgccgatcgtgatagccgtataaaaaagcgcaatcttattcccggtcttcatgcttccatcatatagcccactcccactacggtgcggatcagtttgcggtcgaaatccttgtcgatcttgctacgcaggtaattgacatagacatccaccacattcgtattcgtatcgaagttcttgtcccagacatttttcagcaaggtcagccggctctgtgccgtcccctggttccgaatcagatattcgagcaggcggtactcctttacagtcaggtcgatcactaccttgccacggatcgcccggtggctggacggatcgagtgtcaggtctccacaactcagaagcggtacggcaggttccgcccccgtacgccgtaaaagggctttgatacgggcttccagttcctggaaactgaaaggtttcaccagatagtcgtcggcaccggcatccagtccgttcacgatatcgtccgtcgtccctaaggcggtcagcatgataacgggtgactggtagccatacgtctggcgatactgtttacagagttgcagaccgttcatcttcggcatgatgatgtcgagtatcaacaattggaaatcctcctgctgaaccaactcccagccggcctgcccgtcattggccacgcagacttcatgaccaaactcctgcaagccccgctcgatgaaagaggcgatgtttatttcatcttctactaataatatctttgccattacatgtttttgtgtatcggactacaaatataggataaaaatcatcagatcatttgttctttccgatcctgtaaggcggcctcacccgaagatgatccacttccaaaaaaggaatcttgggatagagaaggtcgaggaggctaagatctatcttgcccggaacgacctcgatacggacacgggcaagacctttcttcttaaaatccagaagttcggccgcaccggcagagacatcgatgatacgtcctttgcggaaaggaccgcgatcggtgacacagacgatcacccgcttcatattggacaggttggtgacacgcaggaaagtgccgaaaggatatgtgcggtgggcagcaaccagctcatccgcatcatggacccgcccgctggcggccttacggccgtggaaacggttgtggtaataagaagcaagcccttcctcctggccccacacgtccctcgtgcccgcgaaagcgaccaacagaaggatgatatgtaccaggcggaagggcatacacgttatcgttttactttacaataacgcaaggctcttgattttattgtagcagctcgattttattgtaacaactcgcccttatattctccggtgagcgtgttcaggaacgccacgaggctcttggtatccgcgtccgagatgttcttaccgatctggaactggtgcatgatgcggatggcatcttcgatcgtcgcgatcgaaccgtcgtgcatatacggcggggtaagcatcacgttacgcagagtcggcgtcttgaaacgatggcggtcctgttcgttcttcgtgacggaataacgtccgttgtcaccatccgtcagccccgtgccgcgataatcgaaataattatccttgatacccatgtattcgaaagactgtccacccaggttcacccccgtatggcaagtagcgcatttattctccttaaacaattcgtagcctgcgacctcctcggccgtcagagccgtcttgtcacccatcagatacttgtcgaagcggctcggcgtgagcaacgtcttttcaaactcggcgatagcatcggtaatcgtagactggttgaaaccttccggatacacttcgaggaaacgtttgctcaactccttgtcttccgccagcttggccgatatctcgtcaaacgagtggctgcccatttcaaccgggttcaaaggaggcccggcagcctgttccttcaggtctgcagcacgtccgtcccaaaactgcaggatattcaaagccgagttatacacagtcggagcattcacgccgccgaactgtccgtctatcccctcggaatattgtttgcggtccacaccggcagtagctaacccgtggcaggtagcacacgagatcgtgttatcgccggaaagacgggtgtcatgataaagatcgaaccccaacgctaccttggccgaatcggtcgggatggaagccatcaacggttgcacaggctcattggcaaattcttcggcgacggtaggtgtcgaatagttcttcttacggacatccttcgcccaggaaagcaagaccgccttttcgtcgctatcgaggtttgtcccccagtgcatcggcatgtgcgaatacttggcgggaggcatggaacctgagagagcggcatcttccaccttggccaggtcggcttcggaaacgagtttgccattgtcgagcgcctccagcatcgccgtcagatccagataacgcgtaccttcccgcatatccgccttgacagtcggaccgatcagaggaagattaccgtagaaaggagtcgccgccgtagccgagtgacactgcatgcatccgttctcacgaaggatggaagcaacctgttttgcctgattgtccgcatacttcttgtattcggaggaaccacacgaaggcagaaccagagccaatgaaagcagccctaaaggtaatgccgtcctcttacaaagaatagtgttaagcataattattggtttatttagatttgttaaatgcaaaggtatgcagaattatcaagaggcatgtagaaagctcatcagttttatctatggcatgataaataaaaactatagtcccttgttattctccagcacctctctgagaccgtcgagcattttgcccgaaagtttcaggcgggcgaggtttctcttgtaatcgtcgggatgatgcaggtcggagccggcataatcgtagaagccttccttcatcaggtatgcggcatatttggcaggacgggcgccatacacgccggcaagtgagaacaggttcagctggaacttgtaccccttgtccttcagccggaaataatcctccttcgtcatatacatataccgttccgggtgagccaagacaggcgtgtagccctccaagctcagttcgtaaagcaagttcagatagtcgggaggaggcgagagataggaagtctcgaccaggacttgcctgtccgcatacgtcaagaggccgtccgccatctgcaaacggaaaccggcatccagcatatactccgccgccagcctcaactcgatcccttccggggcaaactgtttcatacaagcaaaacgatcctgcaagtaactgcgccggttgtcaggcaggtccgccattacatgaggagtcaggaaaacacgttccacaccggcctcctgcatcgcattcagagccgcctgcatatcatcggcgctctgcacaccgtcgtccacaccgggcagcagatgtgaatgcacatctgccgtccccctcaacaaatcggtgtgaaccgcgttcttctttggaaaaagtagggaaaacatcttttctatttattttttatgttgtccgtaaccatacccatagccgtaggaataaccgtagccatacccgtaacggtagccgtacgcgccatgcttgtaaaccgtcccgttcaggatcaggctcatgttacgcagcttgccttcctggtagagtttctccacttcgggaagggcacggcggtccattctgcccgcacggacgacatagatcgtcaggtcggccacccggttgacgatcactgcatcggcaaccacaccggccggtacgttgtccaggatgatataatcataccgcttacgcagctcggcgatcaaagtctccaacctgtcccccagcaagagttcagccgggttaggcggaacaggaccggcatggatgatatccagcttgtcgcacaactcgttctgccggatgatctcatcgacattgtcgatacggccggacagataattggtgacacccttgtccgatacatggacatgcgaactgagcgttcccttgcggatatcgaggtcgaccaaaacgaccttcttgtgcgtaagggcgaaactcatcgccaggttcatggagacgaacgtcttgccggctcccggattgaacgaggtgaacatcaccacctgcatcttcttatccttcacccgcatgaagtccatattggtacgcacgatacggaacgcctccgaaaccgagtcgcggccgttctcatgcaccaccacctcgctcttgtccttcttgtcgcgcatcgggatctcgcccaggaacggcacggagagtaccccctccacatccttccgcgagcgcaccttcgtgtcgctgaccgccaacagccacaagacacctgccggtatcgcacatcccagcacgatggaagccaacaggatcatcatcgacttcggagccaccggagcattgcttcccgccgccgggtcgatgatacgtgcgttgctttccgtcatccgctgcgtcaactcgttctcctcgcgcttgttcaacaggtagagatacagttcctctttgatcttctggcggcgttccaccgaaaggacctctttctgctgggtcggcacagccgagatgcggcggctcgtctgttcctcctgcgcccggatattcttgatcttgatgttcagcccgacgatcaggttatccaccgaacggatgatggtctgcttcatcgcgatcagcgaattgttcaagtcctgcaccaccgggttcttgctactgctgttgctgatcagcttgtcgcgtttcagcaacatctcgttgaactccccgatctgcgactcgatgttcacatccgatatgcccgtgttcgccgggatcaggtccgaactcttgccggggtccgtcaggtagttcttgatgtacttcgccaggctcaactggttctccagactcaatccctcctggcgatattggctggaagtctgcaagtacatgcccgtctcggacgagatatccgttagttggtgttcccgcttgtacgactcgatatccgaatccacatcccccaattccttctcgatcacgatcagacggtcgttgatgaagttggaagtgttcatcacgatctggttcttgtcgttgatcgcatccgtgttgtagacggagatcagcgtgttgatcacatcctccgcacgcgggatggagacatcctgaagcgtcaggttgatgatcgtcgacgccttgttcgccaaagtagcctgcaagcctccctggaagcggagcgccacatcctgcaacggcgatttcgtcacctgcacgaccgtattgaaatacttgtcgccgtaataaagcgacgggaccaccaccacccggccgacaggcgtcgtgaccgtgtcgttcagcgccaccttcaccggcttgccgtccgccacctcctgcccgccgagggtgaatccggacaataccacctcctttccggagacagggaccgccttcaacgaaaaagcctgtgcctcttccgcatccgggaaagagagctgtacgggcgactgagtgtacagttccaccgtccgcagcccgtcttttaccgtgtagctcacatccagatgcaggttgcgcgccacttcggtcatcaaccgcctggacttgaataccagcacctcgttatccacattccgcttcgtaccgaaaagccccagatcctcgaaagcggccgactcgctcatcgcaccgcccttcgcatcatctttgatcagtaccgaagccgtccgggtatataccttgggcgcccacttcagatagaggaacgccgtcccggcacataccacgacagacagaacaaaccaataccagttagccaacaccgtttgcaggatgtcccccaggttcaattcgttctcttccatgcggatgttcgtttcttgttctgtgttcataggttctctttttttactttgttaatgtcacaatcagagacgcgatggaaaccaaagcggaaatcgcgccaaaccagacacccaacgatttgttctggttgatatccgtctgctcggccttcgccttgttcggttcgacatacacgatatcgttctgctgcaaataatagcaaggagaattgaatatatcggacgaacggagatcatgcatcaggatcgtccgcttcccgtccttctcgcggatcacggccacccggtcgcgtcgtccgtagatcgtcaggtcgcccgccatactcaaggcttccaacagggtgatacggtcgccggagatattgaacgatcccggacggttcacttcacccatcaccgacaccttgtagttcaggaactgtaccgtcacgatcgggtctttgatcaagtctccctctatcaggcgttgcttgatcatttccgtcaactgcatacgcgtcagtcccgccacatgcaacttgccgaggatcgggaaatcgatatccccattaccgtccaccagatagcctaacacacgctggcttccagaattggtcgaaccacttcccaactgataagtcaccatcggcatattgaacggcaacgccagttccgggttcttgctgttcaccatgatcgccaacaaatcgtcgttatggacatacacctcgtacttctgctcgatatcctgctgcttcagcgggacgacatcctgcaagtaaaccactttcttcgaagatgcgcaggaggtacaaaataccaccacgcacatcaacatataattccagattttcactcttctttcctgattaaaataagtaattacggtttattggataacaccgccggaatgtcccggatggcttgcgccgccttccttggtgatcgtcgtgcttacaccggcataagttgccaccttcacgctaaacggaacgacgcggccctggtagttgaagttgacagagaaggaagagaggttcttcttggccttcatgtcgatcgtcactttctggtcgccatcagccttggccgtacctaaagagaaaggaatttcttccacaccggcagtcgaacctttggtagacgtgatagccgtgttcagctggcttgccagtttgtcaacatcagaactgctcaaagcggagaacgcgctactcaactgctgtttcaggtcaccttcgatctcccaaccgatcttctgcttaccgttcacttcctgctcggcagcttccatcttgcccaggttgtcgattgtgacggtagacaagttttccgtcgagcttccggcagcggattccgaataaaccgttccgaaagagtggttagagaaaccgtccaacgagcagacataagcgttgcggtccgcatcaaaatcagccgttcctatttctttccagtcattgccttcttccacgaaatgcttcacgtcggcgaagctgatcgcattgctggtcgtgttcttgatcaccacttccacatcctttccaaactccagaccgtcaggcgtgcagttgatagtcgacagactggcatgatcgccttccacttttacccctttcacatactcggtcatcgtgatatcggtatcttccggaactgccccggccgggatatgcagttcggccacatgagtacgttcatcatatacgaccgcgtccttatcagccgatacggtcaccgaagcagccaaagatgtcaatgtctgcgacaaagccacactgccatgtttcggcgtgcccgaaaggattaccgcatcggctgtaactgtcacatatccatcctttgcaaacgtcacaacataggttccgaccttgtccatcgccaactggtacgtcccgtcggcagccgtcttgaccgatttgcccgacgtgctgacctcgacaccttccagcgacttgcctccttccgtcaccttacctgcgatatagtagacctccttatccaatggattatcggtcacgatttcaggtgtcggttcgtcatcatcgctacatcctacaaatcccacactcaatgtcgcagccaagcccatagccagcactgcgctccagaaatttttctttttcatactcattaaaaataaaacattatattatttattatacaattattcatcccccatctctcttttcagcaataattcatgaatcataaatcatccctcctcctatcataaggaacactattgctctcatccggccgagtctcgtagtcctgtccgagtttccggcggaagtattcaaggccgctctgtcccgaatattccatctggtaatattccggcaggcgcaccctcaccttgcgcgacttgccccattgcggcaacgggacggcaaaatggaaaccgccgttcgcctcgccccccgtgtacatggcatacaagccggccgtcgtccgtccgaaatggcggatgcagtccacccgcaccccatagtcgccatagatataccggtgcactcccaagttgaaatccatattgaaatgcctttcgcggaaacgaacctccgccgccccacttaccagcttccaggcagacacctgccatttgccctcgtagaaggtggacgatccggtcacaccgccttccacgccgaacatccaacgatcatccggcgtcgcatagcgcagtttcaggtccgcccccatccggttgttcgtgaagttgccgaccgtcacccgtccgaacgctcctccgggcaatccgaactcctggctcaaggtcagcaccccggcccggatatagtccatctgcccgaccatattgttccaaaccggcaggatcacctgccccgtgaaagccgcccctttccaaagccgcgcctccaccgccggagcgatattgatcaccgccccgtatatcttgtccagccacgaattgctcagcgagatctgcggatacagcaccagctccacccgtccgtcccagggcatacggacctcgttggggttgaagacacgctgacggggcgtcagctcataccggattccacccgccaccgtcttgaaatcgtagcaataggcatacaaggaaaaatggtcgaacaaccgtgccgacactcccatgttcaccgccttcgagtcatattccgccatcacctctagcggcttcaggaacgccggacggtagctcaccccgccgaacacccccttgttctcgctcctgctgcgaaacggcacatgccctcccaccgtcacgccgatatcatggccgtagaaaccgaaatgcttcgtcccgaccgcatagacggaagagaaataacgatttccgcccgaatccaggaaaggattcaattcgccggtcgtcagcaagtcattcgaaccgatcacgaccgacggccaccatttcccctccttcaacggacgcagacgcagggagaccgaacggtcctgattccatttgccggtactctcgaccttcagcaacgtgcaccggtaggccacctccataaacggtaggaacgtcaggttcacgaaatagtttcccgaattatatccccactcctgaggcagcatctcctgaggcaggtaattgcctcctgccatgaacgtaccgtcctcctgcatatcggccgaagggatgttcagcagaccggaaacacccaacgagcgttgggcgattgacaaatgagaattgacaatcgacaatgaaatgccgattgtcaatagggttttctttattattttatgtttcatattctgttttcaaggttccccaaggacccgcacaatctgttccacctgctttggcgtcagcacccgccgcgaagccgtccagccgttctcgtgcaagagtccgagcaggacgggattgccgacgatccactgtttcaagcgcctggaagccacttcgggcgtgacatccgggctatattgccgtcccagcctccggagcgtggtggaacggtttttccattttccttcttcatcatccgacgtcccggtcatacccacctccagtccattgtcgccggacggcaagcaccgacggacaagcccttcaactgcgtcaggcaatcctccagcacccgtaacaagcgttcccgtttctccgcttccgccacaccggacaaaagcccgatgcctttccggatgcgtccgagcaacacctgttcttccgaaggccgggtctgccgcaccgcctcacggacgtaagcggcaaacgcctctctccccagccgacgaaagagcgagtccggatcgtccccttccggcagcccgatcctcaccgcctccatcccttcacctgcaagcgtcgggacaatcgcatccgccgacttgcgccccgccttgtcggcatccagcatcacgtggacagatgtcgtatatcgtttcaacaaagcaatgtgccccgtacaaagcgccgtcccgcacaacgccaccgtatgcctgaaccccgccgcatgcatcgccagcacatccttatatccttccaccagaaagacgctcccctcccggcggatcgcctcccgtgcctcatacaacccgtacaacagttcgcttttccgatacagcccgcccgtttccgaattgacatatttcggtttatcccgatcttcgtccgacaacctccgcgcggcaaacccggccaaccggccctcctcgtcgcgcacagggaacaccagccggttccgcatcgctttccagcgttcgggaaccaggcagggcgactgccccaccccgaaatccaaccaggtaggcgtcagttccgaacatccgctacctgcgggcagcaacaaagccaggaaagcttcgttttcaattgacaattgagaattgacaacgggcaattgctccgcgtcgctattttcttttttctccttgattgccaaccgttccggcaacaacctcgcctccttattgtctttcccttcaatagccaactgtccactgtcaatcgacaatttgttcgccgcctcgacaaagccgacgttctcgatcttgctgacaaaggcgaacacatctcccctctctccgcaagcatagcaaacaaagctccccttctcctcatcgacggaaagggaaggatgccgatccccgtggaacgggcaaagccccatccatcggcgaccgacacggttcagtttcgtataacgcccgatcacctccctgatcgacagggaggctttcagttcttgtatctcttgcttcgtcataaccctaaagaggtttgcgtaccgggctgtatatagtccgtgatacgggtgaacgaagggttgtaccggaaacgggcgatccccgtcgaaccgttacggttcttcgcgatatagatcttgccgacccccaccaagctatgccccgtcttttcgtcgcgggtgaagccatagcgttcgggacggtagatgaacgccacgcaatccgccacctgctcgatcgtccccgaatcgcgcaggtcgctcatcaccggcagatacgccttgtcggcacgcgcctcacaggcacgattcatctgcgaaaccgtcagcaccggacaattgctgtccaacgccagttgcttcaacgcccttacattccgtcccaccatctgttcctgtgtctcccccttccggcggtcgccgccgagaaggtgcaggtagtccacgaccaccaggtcgcatttccccaggcggcattgcagcagcactttcgcccgtatctgctcgacggtagcccctaccgtatagtcgagatagaaaggcaagtccttcaaccggagggcagcctcttccaactgtcccaactcgcgtccggtcggcttgttgatgcgcaggtgatccgggttcacgtccgtcatccctgccagcacacggttcaacatttgcaggctcgacatctccaggctgaagaagcagaccgatttcccggcacgcgccgcgttcagggccatctgcaacgtcaccgccgtcttcccgtcgctcggccgtccggcgacgatcgtcagctccgtattgtggaaccctccggtcacatagtcgaactcggcaagcccgctcttcacctgttcggcctccagctcaccgccaaagcgacgataatgccaggacaccgcctcggcagccagttcgccgatcgtacgcaccggagcgccctcggccgtcttctggcggaactgcatcagaaggcgctccgcctcgtcgaccagttcctccgggacggacgataccttgccagccttgaacgccatcgtcccgaacaacgtgacgaggcatctcagcttatattgtttcttgattccttccacataggccgccacgttcccgtcgtggcgcacattcagcatgtagggcaacaggaacgacaaaccgcccagcttggcagccagttcctcgtccgcttcgcgcattccgcgttccaccagcaccatgtccggccgtacccccgttgcataaattttcatgatcacttcatagacgaatcccaacgaagcatccgcaaacatttcctgagtcagccctgcagactccgcctgcaccggcgcttccatcgaggtcatcaacaggcagaccaacgccttttccatatcgcccaaagagattcctccgtccgtttcttcaccgttcatcattgcaagcctccttccccgtctgcggtacaacaatcgaactgcatgcttcgtccgcccatacggcgttcggcctcttccagggcgaggaaagcggattgctccggcgcatccttccctgcttccttacgacggatccccatgatcgaatcgtatccgcagacacaaacacgaatcccgccgttaagtcgcttcagtccgatcaaatccttttcttgcaaccaaacaagacttcggttcagagttttcgtacacatcccgcatcttttcgccagttcttcacattgtccgacaaactcgccgcgcttacagacataataacgcttgttcaaaaaaaccttcccgtccttgaaaaacacttccgagaacaaagccaagtacaccatgccgaccgatctttcccggccttcgccacgaaataacatctccaacacttttcgcggaatgaggacatatgactgtcccaggaatcccacaatcctttcgttgtttaaattctgatccataatagatggatttaataatgaataaatttgttatggcttgtcgttttgcaaatcggtccgaacggattaataaacaaatatttacgacagcaaatagacaacaggtgtccatttgccctgtccgttccctaatatataataactaaaacatacttcttataactaattataaaaagcgattttcgcatttttttcagaagagcgatcttcaactttcagccatcacaaaggtagagtcaaatccattattaaaaaaaactattttatgcagaatttcaattcctttcaccctttaaaaagaagccatataataccgccgatcggtttattttttattacgtgatttgaaattcttaaattccgctttcattccgtccacgatcgaatcggcctccggaagttgctccttcaacttgttcaaaacggtgttttccgtatttcccgtgtcgaagatgcggtccacatgaccggccatccgggcgaacgagcagtcctcgataatgccggccctcatcatcgcccccatatagaccatgaacaagtcgggacgggccacccatacccgggcaaaccccggagtttccgtctcgtagccgcaatagcggtacaactcgtcactgtaaactttgaaaaaacgatccgccaaacgattccacgattcgtttttctcacccctcaaccctttgaacaggaaagcgagcgcaaacaactccacctcccggtccgccttcaagttggcgatataatcctgcagaagcggaaaagacagatatttacccgttatcgccctcacttttttttatcacatcttaggaaatccttcatgaaattttcccttttgtttttttgatctttcattaattctaatgtttttcagaccgtagtattatatgacattcttcctttttcccttcctttcaaaacatatatgttttgattttaaaacacctatgtttcgttttcaaaacaccggtgttttgaaactgaacaatcggatgcaaatatacgaaagattaatcgactctattcgactctaatcgactctaatcgactttgcgttttttccctgccgtatctttgtatagtcaaaagggacatctccctaattttcaatcttttaatttttaatttttaacttttaatttttcaatccccatgccattaatttacactctcgtcaaacgcaaagacatgagcaaagacgcagcctcaggcgcaactctttatcatgcacagaccagcatcacgaaaaaactgacgctgaacaagatctgtacccgtatcgaaaacatctgtaccgccagccgcggtgagatcatcttggtgctcgacggcctgatcaaagtcatgaacgaagccctttccgacggcgaatcggttcacttgggcgaattcggcagcttccgtatggttgccggcagcaaaggttcggccaccgtcgacggtttcaccaccgccctgttcaaccgtgcccacatcgtcttttaccccggcacgatgctgatcaacctcgtcaacaacgtctccttcgaacgctacgtcccgaaaaaggacgcctccagcgaatcggccggcagtggcggtggcacggatgatcgcccgggagaactgtaaatcaagtgaaagttgaaagtaactccacgttgctatttttcaactttcaactttcaactttcaactaaaaaatcacctttcaactaaaaaaaatgaagcaaagcgaatttttttcctccctccttcccctcgcccgaaaggcgggggaagcattccggatcaatccggcggttatcctggcacaagcggctatcgagtcgggctggggacaaagtgatctcgccagcgagcatcacaactatttcggcctcaccgcctacggccgctccaacgtctggtggaaaggcgcaagcatcgagttgggcgcccattccctccgtttccgtacctacgacagtcccggagactcgttcatggactacgcccgcctgatccgttcggtctacccgttcgccgccgacgtcagcgacgacccgaaagccttcgcccgcaagatcgcctacagcaaatacatcagcgaagtcaacggcgacaaccgtgccgcctatcaagcgttgttggtcaaggtttgcagaaaaatcagtaaactcattccccaccccataaatcataattcataaaccatgaacgtccttgaaaccatcctcagcttcctcaccaccctcgcccggatcatctttccccggcgcaaacgcccggttgccggtgacgacctttgtccttgtcctctgcctgagcctcctatccctcctctccctgtggaaaggggaaacggaagtaaccctcgccgctctcggagcgattctctccctcctctctccccgccccccgaagccgactggctcggtctctccggctacaccctgatgctggcaggagggatcgggagtctttataaggtgctggcgggataaaagctcctcggtaaaatctatctgcttgcgctcacataagcaccatctttggcctcaaagatggtgcttggttctttcacatccacgctatgccacacacctaacgggatctgtaccccatatttgccttcgcgcggacaaagcgtaacacgggaaacctccacgaacttcctatccccgcccgtttcatcctgaccggaagcctcggcatatagaacaacctccaaatatccctctatacagatcgtcgtctccgccgtctccatatgccggtgaacaggtacttgtgtccccggctccaacgcattcagcatacgctgactctgatccaaagcagaagtacgcaaatcaaaattcatccgcttccgctcattcgcaactgctttccgatgaagatcggaaagcagattcttatctattgtttgtatatccatcctttctttgattattcaacaaccaccttacttcttcaatgactcaagatatctctcatgaagatgataatatttcctcatgaacaagagataaaccacagccaacaaagcgatcactattcccaaataaacccaatgaacaagcacccgatccggtaacgcatacaccataaccaaagaaacggccaactgcaagaccatataaacaaggctgaccaccggatgagacatgttcaattcattcgccatcaactggtatgcatgtttacggtgtgcctctcccaagttttcatgaagcataatccgatggcagatcgtaagacaaccgtccaccccgtacacaacaagaaaagacagccatgttatatctccggtctgtatcaccaatttcccgatagagaacaataagataaaagcaattccgatacttccgacatccccggcaaaacatttcgcccggtttttcggacggaaattgaacaggcaaaacaccactacggacaagatcgcgacaatcaaaaacgaactctccataaactggatcttccggttcatcaacagcagcggaacaagcaccgccaacgaatatccccccgtgattccattcaccccatccataaaattgatgatgttcgtcgctcccacgcatacgatcaatgcaagaagcacgatccaccacatatccaaatgcaggatatccaactgatagaacatcaatcccatcgccacaaattgtgccacaaggcgcaaactgtccggcaaactgtgaatatcatccacaaacgatattccagcagctaaagtcaccgctgccaacatccacggatactggaaaccatagagacaactccacacccatgtaccgaccagaaagatgactcctcccccacgcaacaccacctttgaatgagaactgcgctggttcggcttatcaatgatattgcatttgtcggcaatacggaaataaatcagctctgccataagcagaaccacaaaaatcaacagatacaacatatatcaaaaacttttaatcgtcttgatcaaaccttccttagccctgaccggcatcttatctactcccaaagccgactttatcttccggttggaaacgacataattttcagtcaacttggccagacgctccctgttcaagggcagatgcagacaacctccggcactcgccaccatctccatcatcttcttgttcaaatgccagatatgcgccctccgtcccatagcctcacaaatcacagcgatcagttcgttggtcgacaaggcttcatcatcagccatatgatagactcccgaagccacctctttggtcaacagaccttccacaacatagcacaaattatcgatagaagtaaacgtccgtttattctcaaaagcccccaacggccatgggattcctttcttcaccacattatagagcaaattcatatttcctttgtttcccggcccgtgaatcatacagggacgcaatatatagactgatttgtcagccggccatttttcctgaatatattcctcggccttgatcttgctctcgccataaggtcctttgggcgaaggcacaacctcttcggtcaggatatccccctccacctgatcggcagccgctttcaccgaactgaagaaaacaaacttcttcgcagaagaacccaagaaatagtcataaatcttttgtgtcagccctgtattgatatcaaaataaacctgcgccttagattgattcttcgtatcatgcgccttccccgccagatgaataatggcatccacctccggaatattcctttttccaagatcatcccaactataagtttttaccactccatccttttcaggagcaacaatatctaatccgtaaagaatatgttttccttttaatgcatttaccaaattagatcccacaaaaccatggataccggttattaaaattttcatttatataatttttctatttcacaccaaaccttccgacaatcaaaatactcttttacccattcacgtccgaacctaccatctatacgatgtttcaaccggatctcatctatcttttcaactatatcttccggatcatgggtaataaaaagaccactcctgccatcacaaatggcatcacagcaacccgttacacgagtggtaagcactggtaattccattgcctgagattccaagacaccagtaggaaatccttcacgatagctaggtaatacatacagattcatcaaggaataataatattccattcctccattgacaaatccggtataaatgatacgcggatcattctcaatcctttcctttacatcctccggcaaagcatcccggacctcaaacatacctaccaacaaaagcttgcaatcgtctgcatcttccagcatgtcgaaagcccgtaccaaagaaataatacctttatcccgtacaagacgaccggaatatccaatcacaaaatcactttctttaatcccccacctcttacgaaggtcagccactttctgccgatccacaagggccggattaaatttgaactccgtatcaattcctccacaagtaccatgtcccaatactatttgtttattggcaggcgccaatcgatcctcaatactacgcttaagaaccgaaggacttacacatacgatctcagtagcacaaaatgatgccagcctgtccacgctcattaaaataaaacgtttaagaccacgactcgtctcataaaccaacccatgacgaaaatagatacgattaggaactctcatcagccaagcagccaccatagccaaaagtcctcctttcggagtatgtcccactactatatcaatattttttttcttaatgaatttacaaatattccgaatcgtaataaaatcctctttcaacgaaatactacgattgaccggactctctatataatcaaaaccttgttttttagcataatcagccaaatactcgctcggactacacacaacattcatattatagcccttacttttgaagtatttgaattgatcaccaataaaatatggaagaacaaagtagatatttacaacgtgtaggatgttcatgaaaatgaataataaataggaataattacatataattgtatcgtcttctccattaaattaacacaagtcttttcttttttaatattaatttcattaacacgttaatcacatacgaaattataattataactacaagagttataattatatccaaaggatttggatacattgtctttatattaccaaaaatataattggtcacattcggatttatatgtattagatagatttccagacttatacttcccaaaaaaaacaataatttatttagatattccactcgactaattacaagtgtaacacaataaagcagtattggtaacatccccaacattccgtacctcctaatgctaaggcttagaattaaattttgatctttcagcatataaccgccaataaaaatagaaaagccaatcattgcaaatacaattaatttccatacttctacttctttatttatcatattaaagatcaatacaccgagcatatagacagggatacgttcccatgacatatagacagatttaccccacccataatatgaagctatgataccaagtacaacagcaacacctataagaatccctatagtatgtttattcaatttaaatagccaaggagttgttatataaaacgcaagtaatgttggaatgtaccattcaaagctactacctgcagaatcgactatccacccctgtaaccaccatcctaatccgctgtaccaacctatccatttccaccatatgttaggaatagcagaacccgcaaaatgtagtactatagctccaacagaaataatcacccaccatgtagggataatacgtacaatccttcgttggaagaactgaataatattgccatttttctgtaaagaataacataatcctattgctgatagcaagaagaaaatttcaacacctgcccatcctattggaaccacttgatcatatcctgggataccaatcggcccttgatgatacaaatatatccataaaatggcaactcccattaacgcccccctataccttgataaaaaggtaaaatctgttttttttgcagtaaaatcatctatttctcattaattttttataaacattcatatatccttctgccatcgtagaaatatcatactgagcagcacgtttataacctcttttcacaagttctgaatacaaaactttatcctcgcagatacacttaatttcctgcgcgagcctatctgcatcttcatgtgggaaaagaacacctgcacccttaacaacttgtgccagacctttcacatcacttgctattaccggttttcctgccgccattccttcaacagcagcaagtccaaatccctcaatatggcttgattgagccacaacatcagatgccttcaaaacattgtgaacatcatttcgcaatcccaaaaacaaaaccctatcatttacacataactcattagcaagcttctttagggattcctccttttctccataaccaacaagccaaagtttatatgtatcaggaagttttgctattgcacgaatgatagtagcttgatctttctgataactccaccttcccaccattgtgatgatcttaccttctttttttaaatcactagcaggaactgcatcgtgatactttctaacattgataccattacatataactgttgtttttggcgtactcttacctgccacttcaagcatagattgttgagttgcttcagagatacatattacatgagtataacgactatacatccatttttcaataggagtaaaccaccatacacgatgatgacttgtggtagtatgttctgttgtacaccattttgctctgcaaaataaacttgctattgccccatatatctggcaggctgtattatgagtatgtacaatatcaaatcttcgggcaagtttaactaaacaaaagatatttttcggatgatacacgtttgtattttcagagaatgaatgtatggtaattcctatatcttccagttgattataaaattcggtctttcgaccttgaaataaggccaattcaacctgacaaccttgctttaacaatggtagcaaatcaaccaacaacttctcagccccccctgtttcaaggtttgttattacatgaagcactctcattgataatcttcaactttatagactatatatttatctgtaggagaaaattcacgtggaatgatttttcccggatttccaataacaatactattaggaggaacatcaaaattaataaaagctccaggtgcaatcaagacattatctgcaatatatactcctcctacaacaactgcatttgcattaatacacacattgttacctatttttggcactcccttcttatgtcctagagaatttccaataagtacattctgcgcaatattacaattattaccaagcacaactgctggattcattacaatagctccccaatatgagattcggaaaccttttccgagtctcacacctgttggtatttgaataccaaatttaaatgaacacagtttcaacaatacattccataagaagcgactaatacaattcctagcctcttgtgcgtgacgaagaaaataaatatactgaaaacctggtacaaacaatatatatcttaattgtgtcaataaacaatgacacttcagaccttcataacgataaagatcttcctttaaggatctaatcatattttctgctttcttttatcatttatatgcatcataaatcctaatggaaatgtaattaaccataacactccaatatttgccttttgattcgttgtttggcaaagccaaaaacgccaataattaattgaagccctaattttttgaataataggtacttttgattttatcaattcagaataacaaatagtactagctacaggacattgcattctaattcgggttattcttgcagttaaaccatcgggtagataatcacagagataaattttacgataaaaataatagaagtcatatttactggctatcctctgaaaaacaactgcttctggacagaatttttcatttggaatttctggaaaaggaaattctcgtattatcttaacacgaaatacttctgccatatcccctcttatatgatatttataacggaaatccaatgaattacaaacaaatgactcaaacgtttgttctcctccaactttttctcctgaaaaatatgcttttaggccacatataccacatatatcttcacgatctctgaccttgttatattcttcgcttataatagaaatagaatcatccggtaactgatcatcactatctacaataaaaaacaattcacctactgcaatctttgcaccataattaaccgctcgatgtttgccaccattggatacggatacataatgaatgggaaaatccgcctcttccttccatttgcaacacaaagatttagtatcatcagtagagccatcatctaccacaagccattcaaaatccttgcaggtctgtttacacaaactaacatatagttttgataaaatgtaagccctattataagttggtgtaaatattgttactaacataatttacttttatatagttgttctacttcttttgcaacaactcgaatattataatgagattcaaatgctttgctagagagttctaatcgcttctcctcgctataagtaacttgttttaataaatcattccatcttttgatatcagccagttctatccattcaaaacaccctatctgcatatcagcttcaacgggtatggtattagtagataaaacacgtagtccacatgcttgagcttctattgctactataccaagcccttcatacacagaaggaaaaaagaaaacatccgcagcacataaccattgaaaaacattgaaactcttacccatcatacggacattggaaatatgttcatcctcaatacgcctgttcaattgttcaaagagaggtccctccccaatgattatgaagagcatatcttcattctttagttctttagctctatccaaaatgaaagagtgatttttctgatttgtacaacgcccgacattaataatcaccttagtcttatcggacactcctaattcttcacgcttttgtttacggatttgcggatcaaatctgaaagcatcaaggtctattccgttataaataacatgtgcaactttacgataacgcgggaataaccattcagcagcaatatgtgaacatgcaaaaaaaagatttgcatgattctctgtttgccaactacgaatgatattcaacggccacataatacgaggaacatctacacgagcattatgagaatgagcaactcgaacaggaactcctacactctccgcacatttcatgacaagtcccatatcattgtgcatatgagtatgtacaacaccatacctatgaacttgtaaaaaacttgttagatctcttgaatattgttttttattcacaaacggcactacaaaaatagaacaaccaatatctctaaatatctgctcgttgtcacctttcttacggacaagcaaatccacatgaaactgttcaggatcgaaaaatttaattagattatacatcaccatttccgtcccgccacaattcaattgcggatattcaaataatatatttatcattgaaagaatgtataaaaaggatcaaaaagccaagaatgataggtcaaaaaatgaccaccatcaaacaatattacataacgataataaccaaatgcacatatactcactactgctaaccaaataagtgatctccccttagatactctatcaatcaacacacccaatatcactgcataaaaaattgtaaagtaatctttctcacgtgtcagaacttcactacctcttaacagagtaaataatggcaacaaacacaaaaacaaccatattacaattttggtcgttttattttccaaatcaaataatttgatgttcttataaagcacaaacattatcaaaaaatactctaatgtatggaaaatgccaataggcgaaagattttcattaccaaaatatttatcaatcttaccttccatagctccattactagcattttcctgcaaaacccctccaatctgtcccaaaacatcaatacccgtcaacccaataaatatagtaggcaagaaaatgatatttaaccaaaatatccgtttttttgttaacttaagatatgtaattggatataagagatataacaaaagtgccccattatgaatttttgaaataaaaaacacacagatataatacttaatccattttttttcaacaatatatggtacaatcaaaaaaaacattgccactgtaaggctttgtctcatactgataaatgtattataaaaacaaagcttatacaagaataccaaaatgactataccaaaatgttttgtatatcggcttaatcctttccacaaacagaaataaaaaaatacagcatgtaataaacaaaatccataaaaagaaatacctaaggttctgaaaaaagcacatatataagtataacctatctcataattctgattccatgtacttgaatccaatacaataggaaatgtagggacactattataatgaccttcataagtaggaaaatccaatccaccaataagtctcgtaccgctaataaaagacaaatacaaaagacaaaagaatataagtctgtttttatttactgtattttttgttctctcaatcgcaaatacaaaaaagagacttattacaaatagtgacaagattataaacataattacatattcttaagaagacaagccccactagtttctctatccgcctctaaaatcttattcacacgttcataatcaatagcattttcaatcgcattcaattcaccattaaatatacgattttccaaccccaaatggcaaagaatagttttaatacgatcattcatacgaatagcagcaccgtaaacaagaaaattcataaatcgtttttcaaaaagaatactaaatacagttccatgaaaagaattaatgataatcatttcagcatttgcaatataattgatccattcaccaataattggctctatacgtgaaaatttatcaactaccccttggcttccaacatatattacgtccatattctttctgcataagcatacacatctttcatacgtatatgcgtacgagttcccaacagatatacaaagatatatttacgtttgggtaaacaaacagtgttcggatccacaagttttttataatcctctgaatgaagcaatagagtaggatcacaaacaagttgtacatcattacgtccactcgccttacaaatgtcaaccccgctttgcttccgtacagagctccaatcaaatcgttgcaaccaaagacgtataaaattcctgctcacctttcaacccgccaaaactagcagcataggctatctttttgactgaatcattagcccaagaaagaaagaaaatagataccatcacgagtattccaaatttgatcactaccaacaataaaacagtctgcctgaggtggattttacatcaattcttcaagcgaatatatcttatctgaacaatttatttcgaaaagaatcaaaacctctttctattatatattgctttaaataaaaataggtaaataagtaataaagattggaaagtattttacccgtaagaaacagaggatactgccgtaaacggtttgcagatcgtattttatctttcaattgaggtataaatcctgataacggcctccattctctaccagtacgtacgagaaaggtatcatgtccctgctcacgcaaataagtttgaagagcaaaacattgaagcatctgcccataattatcaggagtattccaaaatgtaagtattcctattttcattatattctatattttagtaacttatatgacatatgtaacgaataaagtcaagtccccaacgcatcaaatggatataagattccttccaaaaagaaaaataccgagtatgtttttcaaacgatacccgtagtccatcagcaacaaaagtactataatagcaatctcgttgttcttctcctaaaatattctccaccaacaccttatttccataaatagcttgatcaagattactttcaaaactcgttatttgatacattatcttactatacatttcttcacccttatcagaattaataagaatcattgaaatacccttatcatcatccaaacccgggaagttttttcctattccccaaaaatctccaagagagatatcaccttgacggtttgttgtagtaaacggacaatgaaaacaagcattacgctggctcttattgccaaggaaaagttgcatataaggatcgaacgttgcattcttaaaatattcctttccattatcaaaccgaaaatttatgtataaacgcttccattcttttttcttgcttctgaaattaacagaatgagcctgtgaaccatattgttgctccatcatctctttatattcccgaaaaagctttggtgaaggtacaccatgacataaaacatccacacaaaaaagattaccaaacggtttaaccagaaatcttcggagacctgccacctgacaaggagtaccagaaaacaacaccttccttccatcacgaagcaacttacgtacctgcgggaagattccttccacattactctgcacatatttactcgaacgtaaacgaataatgtcttctatagtttcgcaaataatgtgtacagcttgaagatttttatccatcgcacaaccaacaacgactccaccttctactataaaaacttctgcaaggagagagaaaaccccaccggaagaacttgttttacgaacaactgcatcctgatgcttagccccaattacctgtttcacgctcctctcggattcaggatgtaacattggacaaaccttctcacataatccacaccccacacacgttgcagtatctatattagggaatttaaagccttctgcatcctctaccattgtgatactaccgtgtccacaaacagaggcacaagcagtacacccacaacattgatttttatcggttatattaatcatttgcttatattaactatcctctactccccgtaattaaactccaaaatttcggaacatgaatcttgaggatattacctatttttattaaaacatatatagtcaagattggaagccatagatattcacttatctcaagatatggtttcaatcccgaagttttcatatagataatatttgttactccctgaaaacacatcacaaaaatcatatgggcacaatagataaaaaatgagtatttcatccatgaacgaactttacactcaggaaataaatcacaaacaaaccacaaactaacgcaccacatccagcggaacaaatgattagtaataacatcaccaaaatgtactatgtaaccaaaatagaatgctataagtaacaataatacaaacatactaatcttggatctcattgcagagaaaatctctatttgccgtttaaaacagagagccccataagaaccagtgacgaaaaatatatattgatagataagcattattaaattattagcattaacattaagtggaacctgcatatttccaatataatagttatatgcattgattaacataaaaaccaaaataatcaacaatccaagaattctatttctcaacacataatacatcaacggagaaatgcacacaaatatcatcaaatacttcacgaaccataatggactgaattcactattgacacacgaaatcacccccccgataaactattaacaatctgcatattagataccaatcctgctttttgtaatgaaatcattactactgcataaaagatattccataataagtatggcaccaataatgattttacccgtgattgtagtttttctctccatttgcaactttgataagtccgaaagaaaagatagccagaaatcataaaaaagaatggtacgcaagtttcaacaatgaaaaaccaaaacgactgcagcacattcagccactcataatccttacatgtccatttcacatgttgtgaaactacaccacaacaaagtgcaaaagaaagcacactaacttttgtattaaacgatattttagcaaaatattgcgccatataatgtatttacttcaaaatctttttcaacggatataataactttgatttcactgcttctaaacgtgcaatcttaagcattttactaacctcattattacgcgcaagagtaaacaatttaccattcagttgcgagttcgacaataatcctctacgaatatattcatcctgtagaacatgctgtaaatgagatatttgtttatctatactatatggagctcttatttccatactagttagagccggaatacggcaagcgaaatgataatcaatattggtcaatatattaacattaacaattccctgttgctccacaaacagacgtatatcatcaaatgccctacgatagtgctcatatagatcggggtgaaaacgattagtggctccataacccgactgacgataataatacaatggaagtctaatatatcgaatattatcagccataagtattaccttccaacagaaaaacatatcctctccataagtcatagtaggatcaacgcgaattatctcgcctacacggctccgccgtatcgctttgttccaaagcgatacggcggagccgttcgccatcaaataattgaaggcctccttatgctcattctgtacatcctctatttttacttctgatggtatcgggacaaacttaggatttgtataaaatgtagcaaaatcccagacgacaatatccggatacacctctacaatctcttttctaagaaacgacaataactgtggatgaagtatatcgtcagcatccatgaaatataaatattctcccctacattcgtcaagtccgcaattccgtgtagcactcacaccttcattaatcttatttatcacacgaacattctgatatttcttttcatattcacgaagcacagacaacgaaccatcctttgaaccatcattaataagcaaaatctcacaatcgtcagtatcttgcacaaaaatgctatctaaagaagtccgcagatacttttctacattataaacaggtacgataatacttaaaagcggatttttcatcgtgtccattcctttaataattcacaccctttagcaccatgtttttgcatgatacgatgcacttctgcataatcaatactttcctcaataacgcggatactaccactataaatatgattacccaaacccaatggattgaggagtgtagtaatgcgatcgttcatctttatagcaacacctgttacaggataagtcaaaaactttctaccaaacaaaagagtaaatacagtaccgtgaaaagagttagtaatgacatattcagcattagcaatgagggacagccattcatgaatgctagcctgtgtatgtttgaatttatcctcttgaccttgacttgcaacataaataattttcaaccctttttccttagcaaatgcatgtatctctttccaattgatgattgtacgtgttccaagaaagtagataaacaaatatttatctttaggcaactcttgagatgcaatcttgagataatctgttgctgtcaataacatcgttggatcaacaacacatactgcatctctacgccccgcatttacacagatctccacaccactctgttctctaacagaaacataatcaaaacgtttcaaccattcagacaaagttttaccatcaggtaaagtatcgcatccaccaaaactggcagcataagcaattttacgtattttatcatgcacccaacttaaatagtaaataccatcatgagtattccaaatttgatcactcccaactacaaaaatatctgcaacggggggatcattctgcaactcttcaagtgtatataccttagtacaattcaaatactcttgacgaaactgttcaaaaccgaggtcaacagtacgctttcggaaactcccatgtgtaaatacataaaaagcagaactgataacacgcttcaccaaataaaatggataaggtaaaagacgatagactatacgcgccttttccatcaattgctgcttgaatgtaggactataatctctaccattcgttgtacgcaccaagaaagtctcatgtcccaacgactgcaaatatgtctgtaaggcatagcattgcagtagctgaccataattatcttctgttttccaaaaagttaatataccaagtttcattttccttctattaccaactatcactacttactaatatattcctattataaacagttcatatacattatattttcagatattaaaatctgcaattcatttaagtctctaagcttattaaaatacagatataacattttcaaacatctccatgctattttaacgcattggttaaaaatttcatagattctatctgtctcttagataaaagtatatttatttcctgccaatcaaaggttggaatcttaacactattaacatcgttacaaatacaatccatcaaaccaaaatttgtaagcaaagactccaaacgtgtgttgccccgaactgcattcaactttaccacaaaaggtacattaaataaaatactaaaaactgccccatgaaaagaatctgttataacaaatgaagcattataaatattactcaaccattgttcgactgatatattaagatgtgactgtaaagattctcctcgatagaaaataggtgatgcaatattagaacgaatctcaggtattttaatggcatacgcaatatgcttgactaatgtacgtgccgattccgattcttccaataaataattcaacacatagccattactattctcagaagtaacaaacttcatgaaaccattcttgcctaaaagcattgtaggatcaagcacccaagcagcatccacaccaagtttctctttacataatgtaactccagtattttcgcgtacagaaatagcatcgaatcgttttgcatattcacttacaacaggagtcatatcttcactatactcccatttttcaacaccgaagctggctgcataagctatcttctttgcgttactctttacaaaatcaagataatagttctttatattcgcagagtaacatgggcgccagcattggtcactaccaacgatataagcatccataggatgactttccacataggcatcaaatacagcctgcgtaaataatctatctgtatgtttgatgttctgttgcacaaacggttgctgcaaacgtgataaatctgctttttgcttacttgtcaacaaactagcatcataactcgactttaccatttgaaaaatccgtttagcaacctccttcataaagcatacagacctaggtatatgacgatcaatggtaataggatcatgtcccatctcccttaaaacctcctgcaaagcataattctgaagcaatcctccataattactatgaagagcttgggttagtattccgattttcattctttctgtagaaattatctcaaaaatttctttactatctttttccccttagtacctaaggcaccttttattgcccctacaatcctatctttcatttcatcttgcttcgaagtacgcaaattccgaagaatttttatagcctcactctcttctactgttttagtaaaaatttcaactaacaatggtttatcactaattacaggtgacacgaactcattcatgatcttcgtaaattcctctttatttgaagcagaaaggtacttaaaaccaagatctttcgcataatgtttaactaattcagacgattgattaccaaaatgtcctgcagcagaaatatatctatccgcttcatcaccaaaaatagaacatatatgtccatagtttcggaattctgttccacggccattgttaatgagcataatacgaatgttgttcgtaacatgacgatttccaagagagttcatatcatagaaaaatgctaaatcaccaaaaacaccaatgtgtaaaatatttggattagcaagtgaagctccaagtaatgaagaaatcccaccatctataccataaccacctacattactacttccttttattccatctgatatttcaaagaaattatatgatcgaagcgaattattgatacctagatgaagataactattttgtggcaacttatcatgaatctgttgtgcaatccaaatattactaaatggtaattctggaatcatattaatagtttcagaatattcctttttacatacattataaaactcagcaataggtgtatacttatcaggagtataactagagaaaaaaatgtattctggcattgcaaacacctttgagagcttacgataactatcacgaagttctccgtcctcatttactctccaaacctcttttacattcattcgaggtacaatgctcgaaatttctcctaaatgaatcaaaatatcaatatttaaatgaggagaaatatacttcatttgactgaaaatcagcgcaaaataaactccatatttaccataataaccacttgtatgatcacaaaaaactactgcattgtgagctgcgcaaaaattgtcaatagcttcgatctcttccgatgagaatggtttatgggaacctatgaaaatagcaatatgaataccttttgttattgttggcaaatcctgaaatattgtaaacctatcaatcctatgaacaactggtaattcttgaactgaaaaatcagaactataccccgtatgcatattgatatgtgcaggacctccaccattacgtgtaagagcaagtatagccttagttgcttgaatacgacaataataagcatcatcgttatcttttaccaatggaactgttacactctccattgctatatcattaggtatactacgacggtctatctgctgatctaacagatgaccaatagcaatatctcctcgatgcgaagtaatagctaaaacaggaattttacgataataagcctctgttagtccagacatatagtttcgagatgcggtagcacctgtacagctaataacaacaggctcaccgctctcaacagcaagaccacatgcaatatatgcagcagaacgctcatctacagatgaataaatctcaaaaaatggatcattttgtatgctaccaataaatgtcatattagtagtaccaggagatgctataactttacgaatgccataagttttcaataaagcaataacaatctgcacattacgttcactcgtataatatttttttcccatataacttattttttccatcgagtgtttattgttttaccttcattacacactaagatttgaccattcagacagttagaagcatctgataaaagaaaacatgctacttctgcaacctcttctggaagataataacgcccagtaatattgtatccacaagccaaattttcatcagagctccctgttaccatatctgaaactgtaacacctggtgcaactgcattaattcggaactcactatttacaaatctacaggccaaaccttgaacaagactattcattgcaatttttgtcagcccgtatggacgttcatcagcagtaataccagtttcagatgatatgaaaagaatattcttagttccttcgatttttttctccttacacttatttataaagcattgagttaaaaaaaatgcaccttttaaattagtattaaactgagaatcaaactgatcaggattaacatctaagaatcctttttcatggagcgaaatacctgcattattcacaagacaatttatacctccaagcatttgatcagcatcatctatgaaagatttaaaagacttcacatcttgaacgtcaagcgtaagaaatttacaccctatcttctctgcacttatcttaagattcttctcattacgtcccgcgataagcacttctgctccttcagatttaaatttcttagccattgcataaccaagtccacgtccaccaccagtgatgagaatattctttcgtacaagttgattattaggctgaaggtatgttatatttgcaacaaccttttttggtgtagcatgaagaacatgagatataacagtcattaattttgtttttaaagacataacaattatcgttttatttttgtaataatctctcctataattattccacgctcatgtttagtaagaccaatataacaggatgcaaatccaatagagattacactaacacaaatagtaattaagaaacgaaaaatagatggttcaaaacttagatacacaaacagaggaagaagaactccaacaatagatgttaatacaactggaataattactcttttaacaaaataactaatgggaaaatttaacaatcctctcattataaataaacgaacaatatctatcaaaatatatatcaaaatatataagatataagcaatctctactggaaaacctaacgtatatgagatccaagtcagaggaaaaacgaagagacctatacttgttatccataatacatatctttttatgtttcctgtagccatacaagcagtatagccagtatttcctattacattcactacaataccaataattgccaaccttgtaaatatgacagcatgatctggaaccgtttttaaccaaatagtaagtaaatattcagcttctagctctattggtatagcgaaaaacaaaagaagtaaaattgaaaattttgaacctctacaaataagattaaacatttgatctttctcgccagctgcataacatttagttatctgaggattaatagctattgtaaaattgttaacgaactgcattactgctccttcaacctgcgaagcaataccctttgcagcattcaatgtaactccaaaaaaaacattaaccaacaaattaataccttgtgtgttaaaaacccatgctatatttgtaaaaaaagtccaacctgcaaaacttatcatttcacgaaaaagcctcttatcataaacaaatagataatgactttcttcaaaatgtctagaacagtacattccataaataaaccgcacagtcaatgacacaaacaacataaacagagcatacgaaatgagtttatcccatgatgaaacaacgagcaaataacaaactgcaagtttcatcatcgcttcaaaaatactaatatatgcaaaagctgacatacgttcatgagcaacgatcaaagcactatatggaacactaatcaaaccaatacaaaaggttataagggaacactgtaaaacacaattggcagctaccaaacgctcttctggtatcatcatcttgtaattcaagaaccaaacacctataatttcaccaaaagttaatactataagagaaataactaattgaatatttacacttgttgaaaatatgacttttaatttgtttaaatttcctctgcctaactcaaatgtaataaaacgactaatagctgatgaaagtgcagaagaaataactgcaaacatagccactacacctcctacaacattataaataccatagttttccacacctaactgattcaaaacgacacggctcgtatagagcgtaatgatcataatgaatatggtgcgaaaatacaaaagaattgtattcttcgctattcgtttattatttacctgtatatctgacattaatcaaaataatatttacattacgctatatgattcatttttatagctaactttaaaattgtgcagtctacaaacaataaagatttcacccaataaaaatggctagcgttataggtgcctacggcaaagagggcctgtttgttccgaaacagtcagttataccaaaaaggagttgaaaacgggacagataatccgcatgaagcaggatcgccagcaaaggaaccatacctttccatttcttttttgtgaataattgtattaccagcaacaacaggttgactgccaatatcggccaaaccaacaatgtaaggaaagacagccagatacagattccatcagcgtaatagcctccggtcaaacagagggcggataatactgcaaaaaacaggagcagggtattattcagccttgtccaacgcctcatataccgaattcttgctcttgaactcaggcacgattcctttcatcatccggacggttcccattttgtctactttgatcgcgaggtcgatcaagggggacatgagcgtacagatgtcttcataatcgtattcccggacttgggcacggtagatcttttcgttttccgttggcaatgtattttctttcgttgccaacagttcttcgtagagcttttcgcccggacggagaccggtatatttgatctcgatatcctcgccggggacaaggcctgccagttcgatcatgcggcgtgccagattggcgatcttcacaggggttcccatatcgaagacgaagatttcgtttcctttgcccataaaggcggcttccaaaaccaagcggcaggcttcggggatcgtcatgaagtagcggatgatgtcgggatgggtgacggtcagagggccaccctttgccaactgttcgcggaaacgaggaatgacggaaccgttgctgcctaacacgttgccgaaacgggtggtgataaaacgggttttaccggaatgccggcctttgctgatagcgatgctcaagctttgcacatacatctccgccaaacgtttggacgctcccatgacattggtcgggttgacggctttatcggtcgagaccatgatgaacttgtctacgtcgtacttgactgccatatcggctacgttacgcgtaccgtagacattcgtatggacggcttcgcaagggttctcttccatcaggggcacatgcttgtaggcggcggcatggaagaccaactggggatggaaacgctgatagatgctttcgacacgatggatcatgcgaatgtctcccatgaccggggtaaactcgacatcggggaatttttcttccagctccagccggatgttatgcatcggggtttcggcactgtcgaacagaaccaattgcttcagcccgaaatggcagagttggcgacagagttcgctaccgatggaaccggcggctccggtgaccaaaacgactttgcctttcagggaacccgcgatctcctccatgttgatacggatctcttcgcgtcctaacaggtcttcgatgcggacttcgggaagggcgcgcatcttcagtttgcctccttgcaattcgtccaaagaaggaaggagcaacatacggactttttctttttcgcagaaacgaaccagacgttcgctttcttccttcaccgccttatagcccgtaaagaggatcgccttgatattgtagcggttcaccaaacggctgaattcctcttggtcggtaatgaaatagaccttatacaaaccgatgcgcatggagacacgctggccgaaacggaggaagccttccacctgataggatgagttttcacgcagaaaggaatcgttcaatagggcgggagaagaatcttcatgcccgaatatgaaaagcttgtctttccggttggatgcaatgctgctcaccataaaggtatagagcgtgatcaggaaagcacggaatatcgtcaggataaaaaaagtgaggaagaaatccaccacacttcccagcaggaaaccgcgaaaggaaagaaggccggtcgtaaacaaaagaaccggcaggatggtcgccactttcagtgaagaggacatggcgatgcgtccggtttcagtaaaggcggaatggcgaataatgcctttataggtctggcaaacaagaaagctggcagtgctacagaacaacgacgccagaaaaaccgtcagaatgatctggtcggtatagttccaatccagaatataactgaccaaagctaaagaagtaacggtcgaaaagacggaaaggaacaggtcaatcaaaaaaattatccagcgattgaggtatttctctttcgttaatcttaatagtaaatcattgattttcatataattaaagaatttattaccctacaacaaagttcgtcagtcccaatagtggaataacgaatagaaatcgattttggcagcaaaatatcttaataaaatattaaaagggttactgcacgttgtttattttgtgctatatagcacaaaataaaagctgtttgaacagcttttatacactgaatatatattttcccaagagcgcacaaagatagttaatttatttgaaattcaaaccttttattttttttatatacctaataatcaatagtttgacatcattataaatatccaatgattatcaaggattaattctattttgctctaactaaaaaaatcaaataatatatagattagaaagcggtatagcacatcttatcatatataatatttattgaatatcaagcattatcaaaatcatatcgattttatactaaaattatactgtttctaaataagtagattgtctatccttctctttccgatagaacgggcaaaagaacgggatatattttttcactctgttaacctatttttgaaacaatatgatttacaacaacttaacaaacaatatattccacacaaaagcttgtcagtcccaaagcagaaaaagacataacagtctggacatatgaagattaagtgtctacaaaatgactaaaagaaacgtacgtttcttttagtcattccatttacgaaagattgttaactgttgactttcggaaaatagcgtgcaaaagactcgatatatttggcagacaggaaaataaaaaataaacgaagatgtgtgaatttcaaatattttaagtatatttgccccatcaaaatgactaaaagaaacgtacgttttttttagtcattttattgttatgggaatctgcatggatagagagcgtcactattcttttcaaagagacacaggaagggaaagatataggcagatatgattcaggcacgaatttcaaagaaatccgtgcctgaaaaaacgtgatgaaaccagtgacctattcgatcgtgctaatcgtagaaatcataccgaacttttcgttatcgttcagattccagatcacttcacctttatcattgatttcgaatacctgggggctgttggcctctacggcattcttgtcatgtccctgccagttgcagacgtacaggccgccatcctttgcaggaagcaagccggcgacgaagaacaggcgggctcctttgatatcgttctcaccgtaacggcgggctacttcgccgttgtcgaggttcacttccatcagggagtgaccgtcaccacaggcaacccaatggttcccgttagccaatgccaatgtcgtgaagggcgttccttcgagacgggtgatcttcacgacttcgcctcgcggagagatctcgcgcacgtcggaagtggcaaagaggggcatcaggtagttaccgcgggcattcttgttcagctggcggaactgggcatgcggatgttcgatgcctgtctcatattcggtacgcgacaggatttctcccttcgggctcacctccatgatgacagccggatggcctacccaacccaaaagatagttaccgtcgggcaacacgcgggcggtctgcatctcacaggtatcgggagcggcaatattccagatctcctgatggttgcggtcaatcagcttcgcacctctggcataagcaaagaggatattcccgtcgggagtggctacagcggagttgcattcccagcctttttcgaggggatgctcccactctacctgcttggtgttcttatcgatgatcacgatcttgttccagccggaaccacccaacagcaatttttctgtcttcttctcgcaggatgtagcggttaccagcaacaatgcggaacagagataagtaaataatttatgcataactaataatttatcaatttgcaaatgtgccaatatgccggtgaaatactccaaatagaacattcattccattggtacattggcatattgacccattagcacattattgtaaatccttgaacatttcgaaaccttgttccggtgtcaagccttcgtgtacgacagcgtgtacggcctgaatcatggcggcagggttttcgctctggaagacgttacgtcccatatcgacaccggcagcaccgtcgttaacggcgttgtagcagagttcgagtgcttccttttcaggcagtttcttacctccggcgatcacaacgggaaccggacaggcggcagctaccttttcaaaaccgtcgcagtagtaagtcttcacgatagaagcaccgttctcggcgcatacgcgcgatgcgagtgcgaagtaacgggagtcgcgtgccatctgtttgccgacagccgtcacacccatgacggggatgccatagcggtttcccatatcgacagcttccaccaggttggctgccgtgatggcttcctgttcgccgtcgccggcagagaacatgactgccatagcggaagcattgtaacggatcgcatcttcgatatcgatcaaaacgttacggttcaattccgtcaggatcgtagaaccggcatccgaacgaaggcagacgggcttgttgatgttggcgggaatggaagtctgcaagataccgcgcgtacacatgatacagtcggcatattgtacgaggggaacgatattcaggtcgatacgttccaaacctgaagtcggacccatgataaacccatggtcgaatgccaacatgacggcacgacctgttttcgggttgaagatacgagagaggcggtctttcataccccaagagtagttagacgcaccttttacatgaaaattgtcgaattgggaagtttgtccgaagccgaaattattcgcttctctgaacccatccatatctgccatagcttttttcctttcttaatttttaatttttaattcttaatttctcaaagcgcttgcgcgaacgattcaaacatgcaactccaagaggtagcaccgctgtcggcataaccgacggagcgttcgccgtagttacgggcacggccgaagttggctttcatttctacggtcgaagcagcaccggcaagggcggctttcgctccggcttcgaggatttccttgatatcgtccgaagaacatgcctggatcgcttccacagccgggatcagggcgtccatcatggtcttgtcgcctttctgggctttcgtctgtttctgcacgttggcaagaccgccggcaaacatggctttcactccggcggcatccagttccgtaccggaagcatggtcgctcatacctaagaagaaagcccccaacagcgtactggtggaaccgcttacctgcaacatgacgtcaaaacccatatcgttcagcatggctttgaactccgttcctttctgggccgtagccacgatagcggacatggctgtcacgattgcctgaccgtggtcgccgtcaccgataacggcgtccagtttagaaaattcgtcttcgcgttctttgatgttcttcaaggcgttgtcgagcatcgccttgaagttttcgatagtcagttgtttcatatctcgtttatttaccgattgttgtccagtaaggtgcatcagcacgtttgttcttcagataatcgatatgatcttcgtcgaggatagccatgatcatctggaaaccggcctgttcctgtacggtcaggatttcctggatgcggcttacgacaacctggaggccacgggcttccagttccttgtaggccttacggaagatgatgttcaactccatgtgggtagtcgctcctacgccgttgatgataagcatcatcttgtcgccagccttcggcttgagctgctggcaaagcagatctaccatctcggcagccgtatcgtcggcagatacaagcggtttctgtccgccaccgccttcgccgtgctgtcccataccgatctccatgatgccctggggcaggtcggtgatcgtaccaccattctgcggatgcgtacaagagcgcatggcaacggccagagtagcgacgttgttgttatagcgttcggcgatttcgaccagctcgtcaagcgtcttgccttcttcggctgcagcacctaatattttatacaaaggcacacaaccggccaagccgcgacggtcgttgatgtcggcaccgataccggcgctgatatcgtcgtgagtcagcacttgtttcaccttgatgcctacacgttctgccaactggcaagccatgttcgcactcatcacgtcgccagagtggttcaggacaaccaacaggataccggcttcacgcttcatcagctgcaaagcctggaacagacgctgtgcaccgggagcggcaaagatgtcgcccacgacagagcagtccagcataccttcgcctacgaatccgctcaatgcgggttcatgaccggaaccgcccaaagtcacgatagccactttgtcttcgctcttcggattggcacgtacgacgatgttttcaccacctaacttgacctggtccggatatgccaatacataaccttccaacaattcgggtgttatctgttcgggatcatttataaattttgtctttatgtctgacatggtatattcctcctttatttaagtatgttattaatgttattatttgatttccatgatttcgatagcgatgccttcttcttcgatgaaagcgatcgtcaggtgttcgtcgcatacggccgggccgaagatcaccttcttgcctttcaactcttcctccaaagaaggaacggtgtaggcaatgtgtccctgtttctgtaccagttcgggcaggcagctaccttcctcgaatttcaggaattcgatgcgattcggacttttgctatagtctgtcaaccatactttcaggccttcgttaaacatagccccttctacttgttctgtcgttacgataccgacatgattaaatgttctcatgactaattaattttaagtgttcgtactattttttattcgttatcagttctctcaacctcaaaacatagatgtttcgcattcaaaacaccggtgtttcgttttcaaaacatatatgtttcacaccttcatcttccatctcctgtacgaaaggacagccaagataacgactacccccaaggcgatataaagataggtgaatattccatgcacattatcattttgaccgtatgaatgcattccgctcaggaaataattgacaccgaagaaagtcatcagcacggaagcgaacgcgatcacggatgccagattgaacaaccaaagactattccagcgtttcaccaagtggagatgagtcactacggcatagacgaccatcgtgatcagcgcccaagtctccttcgggtcccacccccaataacgaccccaggactcattcgcccagacagcaccgaggaaagtgccgacagtcatcagggcaagccctacccacaacgccatctcacccacaatactcagttcggtgatacgggctttcaatatctctttgttcttctttccggcgatggacatcatcaccatattggtcagcccgatcaggcaactgataccgaaaaagccgtaagcggcaacaatgactgctacatggaacatcagccacggcgatttcaggaccggtacgagcggattgatctcagggtccatccagttcagaccggagacgaagaggatgataccgccgaacagggtggccagcgcgaaggtgatcgtactacggcgcacgaacaacagtccggcaaggacagtcgcccatcccacatagaccatcgtctcgtaggaattgctccagggagcatagccaccgatataccagcgcatccccattccgaacatatgataatggaagacgaccagtacgccggctcctaacagccatacggcaaccttcatccagcgggtccggcggaacagcatcgcgaaagaaaggaccaacaacagtccgcccaagaccagatagccgatcttgcaatagcggaagacatccatcttgttatatttcaattcggactgcatgcgcttcggactgatatcgagtgtcttgttcttggcttgctggtaggtgtcgatcatgccgaccacttcatctgctttcgcccaatcgccactcttcaagccctcctgcacttcgcctaaataccagtcgaaaatacgggagacgaacatggagtctttgccggtaaaggcagagaggtcgtcgccgggtgcataccatttatgattcggatcgtcttctttcggaaaaaggttcagcatctggtgattgatcagctgatggaagatgttcaactgctcgtccagtttcatcaggtccttgtcgaaacgcgtacgctgggcaggcatcttgttataggcttcttccagcttctcttgcagtttgtagttgccgttactgtcgaaggcctggatataggcacactcgccgtccgtcaggtcataataggcggccaactccggattggacagggcgataaagggaacgcgcatccacatatcgggcatggctaaaaggctcaaaaggaactggtcagagttcaactgaccgatcttatccgacttatggagcttacgtagaatctccgaagagaaggtattgaccggcatcatacggccgctacccgactggatcggaagggctccgaagagggcagcatgttccgggctcaccgcatatttctgcacggcatcgagcatcggggaagccttcccgccggcatttacggacaggggtacggcaaggagcgcaagcaacaggaccgctacgttggtcgccttgcgcaattctttcaggcggcggctctgacgcataaagcgggaatccttaccgaccaggcaaaggatcaggccgatgaccagcaacagatatccggtgtaggtgatgttccgccccgccacgtcgcggttgacggaaaggatggtcccgtgttcgtcctggtcataggaggcctggaagaaacggtagccttttacatccaatacgttattcataaagatccgctcttcgcggtcttccccatccacatggacgatcacttcactctcgtaggaagagggactggcggaaccgggatagcgggttaaggtgaatttcttcagttcaacggaaaaaggcagggtatgaaaggtcgtgttatcggaagtgcggacagcaatctggttgcttgtctccccttcacgcagatgcaaaattccatcttcgccgaaaaggaaagaggtcaaggcgccgagaaggatgatgataaaggcgaaatgagtcagcatcagtccccatttgccgcgtttcaggtattggtgtttgatcgtagccgcaataaaattaacgactaaaaggaattggagcagaaaaaacaggggggaataataaaccattgctttggctgtcgctgtaccgtgatacttttcgatgaaagtggcaacggccaggccaaaggcataaatcagtaacaggacgatcgtcgttacaaaggaggagaaaaatctttcgagatttgttttcatttacttttttattagagttcacagatgcggcaaatgtacgcagattaatcgtttgatgaaataaccggtggcaatctgccacatctgtgtcctctattagttgatagatatcatctataccttttcattatcaatcttcaatgatcatacggaagccgacgttgaacacacgctggtacggatagtaagccttacgcgtatgggaagccgcatatttcggacggtcgatataagaaccgccgcgggccaccttgtattcggatgtctctttcgtcttctcattgtacggatacgatacatagtcggaacgggtccattcggctacgtttccgtgcatgctgtacagaccgaagggattggcctcataagccttgccgccgacctggaccaggttaccgtcgtccacgctctcttctttcggaaggaaggtatagtacttgtaccacgggttggtcttcgccatcggctgcgggtctacaccgtaaacggcaaacaacagcgttgtcttgtccgccagattgtccttcttgccgaagtccgcatgcatgtcgccataccagaagtcctggtcgctaccggcgcggcaagcccactcccactgtgcttctgtcggaagcgtgatcttgagaccggtcttttcgctcagtttccggcagaattccatagcatcgttgtagctgacacggataacaggctgttccggtttattggccggatatccctgaaccacgtggtctttccactgctggtcgacgaaacggctgtcgtgatccgggaagacaacgttgaactgttcgttcgtcgtttccagctcggccatccagaaggctttgtcgatcttcaccttggcagtcggataagcatccggttcgccacggtaactacccatcacgaattcaccggccgggatacggacgaaattgactttcacacccggagcgatctcaaccaccttacgggtttccttctccttagccagcatttccttgatccggtcagcaccgaaaggccaacctttcaccttcaaggtcttttcctttacaggagcggccttttcaggcattaccggggtgatcgggccttgtttcttcaggtagtcggcatagtcggcgatttctttcttccagtcgacaccggctccgttcgcatacttgtcggtcaattccttacgacgcttgatctggtcgaatcccttataaggaagatcagtcaatacgttcgcattgaaataacccttgtcgggagcgttgtagtcgatccagttataaagcgtcttccattccttatcggtcagtttcacgttgtgatggcctttcttcagcaagcgtaccaattcgctcgtgttgggatgatattcgtacggctgcaaaacgaccatgtcgccttcgcctccctgacgatgcacatacggatgcaagttcagataagacgtgccataacctagcttgtctttctttccaccccgcaggtcgaacgcttttccttcaccgttatgacaagcaatacaagcgcggtccaggatcggctgcacttccaggtcaaacgtgaaagagcgtgtaccgccttcgggcagagtcaaagcagacggagctttctgcgaagcgatcacacgtttcgggatcgcgatctggttctggtcttcatgacaaccgatacaggaaaccacttcgcccggctgaccggtcacccagcttcgcatccactggatagccacgccgtccttatccaaaggctggatggagatcggtgtattggcaggagccttgaagatcacggaaccgtcttcttcgacaggaaccgtccccaacatacgcttgatatcccaaccggactggattccatgccagttatggtcggaacgagtctttacatacgcatattcgtaagcatgcagacgcagagacttgaccgttccgcgaggaatacctttcagaccttctccttcgtagatatcctgaataaagaaggtcgcttccttttcattcagtttcacacggtcgggaatggacggaggagtctttgtcttgcgcaccaggatcgggctgatatagccttcgccttctgcctgcatcagacaggtcacgttgtcgtagacgtccaccagatagagtccccacaaggcatgcgggtccaacttggctgcaaccaggaagtatttgtcgttcagcggagtcggtttgatgaactgcggccatacaccgtttaccagctggtccttgatttcttctttgatcggacggttacggtgagggatttcctgtaccataccggctgtgctcttacgtcccttggtcggatcgaagatgatcatacggcctgaacgtgccacaccgtggtggccggagatgataccgacgaacgccgaaccgtggccgggcaacggctgcacgtcgaacgtactgttcgggaacatcgcaccgctaccgtagagggctttgttttccgttccgtccgggttcatgtgcattacgatacgggaatagtagtgggtcaggtcggtgtactcccagcgggtgtacatcacgcggccgttattcatgatgaccggattccagttggcatcctggtcgaatgtcaggcggcgcatgctcttgtccttcgggtcatacagcaccatgttacctaccgcatcgctaccgttcacacaaggaacaccctggtaaccgatgttggagatagcgatcacacgaccgtcgggcaggtaagtaccatcgtagaactccagatccggctcgtcgttttccacaagcggcttgaagcctgtcccatccagattcacttcatagatgttccagcgcttgtcgtcctgtgtctgtgtgaacatcacacggtcaccgtcccaatgcagtttcaggtcagcgatggaagaaccgtttttcggtttgtagacctgacgcatctgtatatcgccacgcagattggagagttcgacgatctcggcatcgaagccctcacgaccggcagattcctggttactccagttattggcctgagtccccaaggaaggagtcatgatctggtgtgcctttgaacctaccttgaaacgggctgccacgatcttgtcggcatccagcaacgggttagccagcaagatggcacgtttgcattccaatgctttcttggcatcggcgatagcctgttcgtcaccgttatagatgcctttgaaacctttcttttcgagccgtaccagttcgttcagcatcggttcgtatttggcggcgtcgtagcctttctgctttttcatatcggcgaaagccaatttgacagcctcgacgttcagccattccaaatcgctctgaagcgtgtacagctcctgtactttctcaaccagttcgagatatttgcgtatctgtgtattgagatctttttcgtttgcgatctgctttgccacattcgaatagtaggctccgtccttcaatcgggcgatcgcattatccgcagcctgcttttcgactgaggcatccggggtgatcaaccaggtatccaggccgtccagtaccgcacccagcataccgatttcttccggatacttgttgttcaattcttccgccacaaaggtcggaaccgtattcaatgcctggaaaaacacacttccgccacttgaagtatcatcgataccgacttcggcttcgaaacggacatactggccacccaccgggtataccaacgtgccgttcgcatggcagaacacaccgtgtttgtattcctttccagcaataacgatctcatgatcgtatgcattcgtgttcatcttgggttttgcccaaccggcaacaccgtattcataaggaacttcgtccaaccatacggctgtaccatcggctttgatcaaacgggcattcgcccatacagcctggtcgtaatccgtaccatcgggaccaccggccgttacaagcaccagcttatccacgcctttcaagtctaccacgaaaggttcggctttcgccttatgcttcatccaggtagaaacgatcggcattccggatttcttcagctttgcctgtaattccgttttggctttgactgaagcatcaatccacgtttccgccttcttctgcttagggccggcagacaccataacagaagaggacagaaagagtgatactaataaatagtatttgttcatgtaataaattataaggtgtttattacttattataacgcagctttcgtgttggtgaagcgcaagccgtcattatcgtggtagcatgcccattcatcaacaatagcaccttcaggaccagccatcataaagtggaatgtttccagttttttcaggcgaagaacatcacctacattctgtacgacgaaatttttgctcttgatcgcaccatgagtagcggggatagcaggagcgttcggagtctcgtcgcctacttcagagaagttgtaaacccatcccttttctaccatccaggattcatgtttagccgggaatttggtctttacatgcgcatgttcggggatcatctgtcccggaagcaggtagatcgcgtgagcgaagtagccgtattcaggatcgttgacccagaaaataccacccatacccacgttttcaaaatcacccagaccgaaatcagtcacccacatgtccttagccatcagttcggtgaaaggaacaccgtagaaagcgaacatgtctttcattgcttccatagcaacatcctgttggaacttgccgtctttgtagaaatcggcatttgtgtacttctttgaatacttcatttctttattaattttacagttagcattgttgttacattcattcttgcagtcgtttccgcactgttcggtgcattgtccttcgcctgccgctacgcaacaggtagcctcgccagtagatgttttgccgttacatgcagccatcgaaagcaggagggctcccatagcggccgatttcataagattctttttcattttttctcttgtttatttagttagtaatatttgttctgtacctatttcctaccggagaaactttgtttccatagggtgaaacgactgtttccatacgaggaaacttttgtttgatgcctatgaaacgtttactcgatggcgatcccttctatttcgatcaataactcatcccggcaaacgtccgcccacatataagatatggggatattcaaattatatccttccagcagttcgcgtgcctcctcatagaaggatttctctttcagatagacacgcagcattttcagtttcgccttaccaatcagctggccgatgttttccatcgtgatatggagctggcgtccgagccctactccaaccaggctttcctccccgcggatagctgccgtaccggaaatataaacgatccgccggtcatcgaaagtcatgcttttggcccgttcgaacttcggagtggctttcttctgctgggcagcttcgaggacctggtccgaataggcgtgggcggctatctgcaatttattgtcgatcggggtggcatagcattcggaacgggcgaacacggccgcatccaaatcgaccagtatgcctcccaagttggccccgataccggtagcagccggataaccgttgctccagtccgtctttccatagaaatcggcacgggcgttgttgaacatctggtaatgctggtccggcccgtcgaagcgggtgatctgctcgatgtagttccactggcggatgatgcagtttacggggaagccttcccggcgcatcacctctcccatcatgtggaatacttcggcggactgctgctggataccgaagtttatcacatccccatggaggccaccggcaaagaggaaacggccatcggcattttccagtacgacatacgggaagccgccgtgacggcggaaggtgatatgatcgtcttcgtccgctttgtagctatggacttccaagataagtccggcattcagaggtggctgggaaacataactcaataccggttcatgatttccataaaacttacggattttctcacgcagcatgatgcgacgggaaacgtattgttcgttgtcgttcggcatgccgaagaatgccaaacggagaatctgttcgtcttgaggcaactgtgccagcagggcgtctaccatttcaccgaaagtagccagtccggtcgtataaatattataatgtattttatcgcaatagttcataaagagttcacatattcggttaatgcttcgatatctttctctgaaactttcttctcgatgccgtgtttatggacactgaacacttccttcatggtagcggcacgtccgtcgaacaaataaggagccgtacgccacacttcacgcaaagtcggagtatcccaacctttttcgaactctatatcctcacctatgcggtggtatttcatatccgtataataaacaccgctatggcattccccgcatttcagcttttcgaaaaccttttgcccttcctttgccaaatcagacagctcgccattcaccaagtaaggactgggcacgggacgaagtgatttcaaataggcatccacacaaacagcatcttcttccgaaacttcaaaaaactggatgaagttgaatcctgcccgcacagcccgttccgcatgttcacggataccggaaatcatgttgggaggagtcacatgactaaagagcatgctcttgcagttcttggagttgccgacaccgtcgttcatcaagtcccagttcatgccatccgttcgtccgtctcccggatggcagccattacaactctgccaattctggaagcagtgcgaagcatcgttgaagtagcgttcacccttgttttcagccgtttcttcacgtccgggattcagttcgacagacgtcacttcgttcgtattgatatccatgatgttcaggatatcggcaaaataagtcgggataatcagcttgtcaccgttcaggatcatattgcgaggaccgttcccctccagcgggatacgttcgcggaggccatacaagaaagtcaggtcgtagtccaacaccgctttattgggatagttcaggaatttctccaacatcgccttatggtcaatcacgctgacctcgtgcgttcccgaatgggagatgaaaacagactcgtcgttgcaggcaatgctccagataccggccgcaccccgttcgggttcatccacgacgatggctcccaggaactcctgcttgtcgacatcgatcacgctgaaagcactcgtgttcatccatccctgctgcaattgagatgtagggacggtgaaacgccccaagttgtgcgatacatatatatatttgccgtcgggagttatacagattccccgaagggcattgcttccgtttgccaactggatgtccttcaccttcgtgaagccatccatttcgatgacggatacacaggcggccacataatcgagatcagctcgctgtgcaggaaggaagttcgtgacgaacatatatttgccgtccttgctgaacacggcggacttcggttcgcgcaatgccttcaccgtacgcatcaccttccgcgcaaccggatcgatttcggagatcgtagtctggaactggttacatacatatatatgcttcttgtccggaccgaacatcggatgacatgctcccgaaccggtcggaatagaagcctccaccctgcccgattcgagcgagaggatctgtaaatggcctgtcgttccgaatgtagtcacatatgccttgtcgccatccaaaaggatacccgtaggcgcttcgtccatcgggaaagaacgcaacaatgtcttgccatcaggcgaaaaaacatccacccgctttactcctttatctgtcatcagcaactcacctttggcgttcgccacgacatctgtcgggaagaacggtgggttgcctgctgaagcaaaggagatgcaacagcaggcaaaacaagccaccagtgagtttttaaacatgtattttcgtgtgttcatggtatattatattttttttgctttactatatcccaactcaagagaaatcgtctgggccactttccttatacagtctgccgaaacacgtacgacctctttcgacagccggtccttagggcctgaaatccaaattgccccgcaaggataacccgtataattaaagataggcgctccgatgcaaatcacaccgttcagttcttcctcattatccatggcataacccaatttccggaccttctcaagttcctccagataagcgtcacgtgtagtaatagtccgggcgttgtagcgtgtaaattccatataagacaaatatcggtcccggactgtattcggcaaataagccatgatagcctttcccggagccgaacaatgcaaatcgaaaggttttcccggcgagaggataaaacggaacgtatgatgtccctgcgcctgctcgataaagatacctttccggtcccccagcacgccgaagcatgccgtctctttcacttggtcgcgcaaatcgcgcaaacgaggcaaaacagtttccagcaaattgtgttcattcaacgatctgaatcccaaagttagtaatttacgggataacttgtacctttttgtgtcttcattatagatcaaataatccagacggaccaacgtatttaaaatacggtaggccgtagtctgtgaaatatcaagggcggacttgatatcctgaagcgtctcaccctgggtgtgaagcgacaagtactcaagtacagcgatccctttttcgagattcggaaccttgtagttctcttctgctttttccatatttggaataacgctttccatatttgaaatattgtttcagatttgaatcaaatataaaagagagcgcataaatgcaagcaggatgtttgtaaaaattagttaagtatgtcgtaaaacacattatagttgaaaggtgaaagtgaaaatgcaaatagcaactttcaactcttcttgtagctgacgatggccagtatgttaaagaacactacgaacaggtagatgatccccctattgcctaccgacatcaacccatatacaagccaggcgatacaggtacctgtcgtgagcaggataaaaccaataatccaataatgttccaatatgtctgacacacgcatcaaaagcaatataaaaaaacaggagcgcaacagctacactcctgttttaatatcttttagagataaaccaaatcttacttatctattgtacgggcgggaacaccttcgaaagtcattttaacaggatttataaatccgttctcatcgaaagtcatccggtcgatacaagtcacacggtggtcgcgagtattgtcgttcagcgggcggcgatggtagacgatataataatcttcagtattcggaacatgcaatacggaatgatgcccggctcctcgcgcgattgtcgaatcctgctggagaatcgtggcgatacgattgaaaggtccgaaaggcgaatcggcaatcgcataagcgacacaataatcgggacctgtccagcccccttcgctccacataaaatagtacttaccgttcttcttgaacatgaacggaccttccacatatttatccggtgtcacttccttgtagaccgtcccgtcttcaaaaggaaccaacccggtgaaatcgtcgttcaggcgaacgacattacaatgtccccaaccgccgtaatacatatagtagcggccatcatcgtcacggaaaacgaactggtcgatcggctgtgccccgtttacgatctcgttgataagcggtttgcctaacaggtccttatacggaccttccgggcggtcgctgacggcaaccccgattcctcctacttcaccttcatgcacgtcgttggccccgaagaaaaaataatatttgccatccttatggatgatagacggcgcccacatggctttcttcgcccatttcacggcggaggtatcgagcacagacgaatgtttcgtccagttcaccaaatccttggatgaaaaacagtcgaaataagtctgcttctcatacgcatcgctccaggtcgggaaaacccaataggtatcaccataaatgatcccttccggatcggcataccagccctcgaatatcggattaccactggtcacgacatcagcaacagccttctgttgctgtttcggctgtccgcacgaaactaatgcggcagcacacaatagcacatataaactttttttcatttatgagttagattttttctgttccatattcttagccaaccccccttcggatgtttccttatagagactcggcaggtcgtttccggtctgacgcatcacttccaccacctggtcgaaacttacacggtgcttgccatcggagaaattggagaaggtgttcgcatccagcgcacgggctgccgcaaaggcattgcgttcgatacaaggaatctgtaccaacccgcaaaccgggtcgcaagtcagtcccaagtgatgctccagccccatctcggccgcatactcgatctgtgcaggcgtccccccgaacaactgactggccgcagcagcagccatcgcacaagccacaccgacctctccctggcatcctacctcggccccggaaacggatgcattcgtacggaccacattaccgaacaacccggctgtcgccaacgcacgcaagatacgggagtcacggaagtcgcgggactctttcagatggtaaagcacagccggcatgacaccgcacgaaccgcaggtcggggccgtcacgatcttgcctccgcaagcgttctcctcggaaacggccagagcatacgcatagaccatcccacggcttttgatactgctgccgtaacctttggcacggatcatatagtcggatgccttacgccggattcccagaccgccgggcaagatgccttcggcttcgaggccattacggactgcttgttgcatcacttcccatacttcggccagatagtcccatatctgcggaccttcgcactgttcgacatattcccagtaggaatggccggttttttcacaccaggcctgtatatccttgatagtatgcatttcgtaaacctggccctgcgtcaactcgttgtaggtttcgtttgccaacgtccctcccccgatactgtaaatcgtccagttatccagttcctctccgctttcgtcaaacgactggaagaggatgccgttcggatgaaaaggcaggaacaccttcggttcccaagtgatattggtcttggccaccgggctcaacacttcgagaattgccgcatccgtcatgtggcctttgcctgtagccgccaggctcccatagagcgtaacattaaaacgtacggctccccgattgcgttccaggaacatccgggcagcacgcatcggccccattgtgtggctactggacggcccgtgaccgatcctgtatatttgcttgatcgattccattgttttgagatttatgagttatcatttgtaatttatgatttatagtttatgcattgatgataaattataaatcttttcacactttcaaaaatatattccgcttataaagcagccacaaaattacataaataatcaatgcgttcgacgctgcaatcaaagccggataataatttcctgtatattgttcgaggccatgaaaaagagaagttcctatacatctgaaactaatcacgttagccagcatataggccacgatcgaattcatgccgtagactttcaaccaagtcaggttcttccggtgtcccttataatcgatccaataatagaacaagcccatcaacaggaaacaatagccactgctgaccaacaccatcgagctcgtccatatcttcttgatcaccggcaactgcaagccccacagccagcccagcgcaaccattatcacaccgattcctaacagccattgccatttgtgcttccggtccattccgctcttcaagatatgcccggcaaaaactccggtcagcaccgtcacgccaaagttcaggctgcttaatatccaggtataacgataagatccggcaaatacgatctgtccgttctccacaacagcagcatcgcggaatcgtcccaggaccgtacggtccacccattccgccaggttaccgtccggcgtgtagttgccacctccataaccatcgaccgtaataaattgcatggctccccaataggctaacaacaaggcgaccgccgtcccgatctgcacggacaaacgcacatgcaggaacagcattgccgaaatcagatagcccatcgcaattgcctgcaatgtgttcgaataaagataaatccggtccgggtccaatcctaaaagatttccctggcacatcataccgaagacccagagcaaggccacccgcttgacgatacgacggtagaccgcccatttatccggcatcactttatatcgggaaagggcgaacggcatcgacacgcccgccataaacatgaagagcggcatcaccaagtcccacgaagagaacccctcccactgcacatgcgagaagcaccacaaaaaatcgttataccaaggcgcatctatcgcacgtccgagaggatgcagaaccccttccagcgccaccaggcaaaacaaatcgaagccacgtaacacgtcgagcgactccaggcgttgataagatggtttcatgatgatttatgatttatgatttatgatttatgatttgtataaaaaaagatttcagatttatgtttaatgttatgttttctggtcataaatcataaatctgaaatcacaaatttcttcacactttcaggaaaattcgttgacggtacaggaagtacaggaatccccagcaaacggcaatgtagccgatcgaactggctaaaggctgcgcggcttccggcatccatccgacaagtccgccaaacaggccttgggatgtataagagaaatcgatgaatttttgcgccaaatagatcgtaatcgaattaaccccgatcacctggaagaagaaagtccatttcctccatcccaacacatcgacaatgtaataaaacagggcgaacatccaaaccgaataagctccgacaacgcagacaaacgaactgctccacagctttttgttgatcgggaacaccaaactccacaacacccccaccaatagtaacagcacaccggccaacaccaagcctgccaccttccgcttgtccgtcaatccctctttacgcaacttgataaactcgcccgtaaacattcccaacatagccgtcacaatccccggcaacgtggacaacaatccttccgggtcaaaaaatccttgatgcaaacgtcccggcaacaacaaacggtccacatagccgacccagttgccttccagcgtgaatggtccggcctccgcacccggcacagggataaaagctatccaaacccaatagccgaccaagatcgtcccggctatccacgccctgactgaagtccggaaatgcacgaacagcaaggcggcaaacatccatcccaacccaatacgcgccaagacgctggcgcaacgaaggttcgcaaagtcaaactgtagcaatccgttatagacacatcccagcaacaccagcgtaattcctctgcggacaatccttttatagatatccggctcgctcttcccctgttcgcgctgcttttccaacgagaacggaaacgagatgccggcaatgaacagaaacagcgggaaaatcgtgtcgtggtgtgtcaacccgtcccactccacatgatccatctgtccacctatcgcctgaaaaaaagaattcggaaacaacgttgccaacgcaacgaaaagagaagcccctcccataataaagaacatatcaaaccccctcagggcatccagcgacagcagtcgccgggactgtttttgtttttccatatatacaatatctttttaagtttactttgtcgatcaagtttgcaaagataggtcttttttcaacacaagcaatttatacaagaaacctcgtttcttcagataccctaaaaattttcattctttccccaacagtgaaaataaattttccatcacatgaaaatttatttccccactatggaaaatttattttcatgcgatggaaatttctctttcatgcaatggtatcagaacaacgttcccaaccgaaattttcttcataccggtcgaagaggggttcctcttcgatattgtattgacggagcaaatcgcgtacgtataactggtcttcgggagtaaaacaacgctccttgcgtttcaaacggtaaaaatgagtcgtcccgaaatattctctcatctcccgccgtatttctttagcctggcgataagggatattgtccaacaggtgctccatgccataggcatttttcaacgggctgtcgtccataaacccggaacaatcgccatcggggacaacacgttccgggttgatcgctctcaccgcccaacgttctttcgggatatgccgcgacacctgatgacgcagacaggtggaagcatgtaggcatttcccgttaaaacaaagtgcaaagtcgttcgggaccaaagaataatctaatttgtctaacatggtattaatgtattgatattagacaaaggtactcacagatccggcagaaagcaaacatttacactcaaaaaatgatcacaacaacaatgactataggcgagatgagggagttcaccgtgccaacggctgccatttcatataagttccggtcctccacaaccactccatcggtccatagcgaaactccttcagccaataatggctgaacagaatctgcatacccgtataagcaagacaaaccaatacgctcaagaaaacacccagatggctccaatccaacccgaaaccggaaaaaataaagactccgatcacggactgcgcgatataattcgtcaggcccatacgcccgtagctgactaacggcgccatcgcccgctgtaccttctgcaaacggtatccctccatcaccacaattacccatagataagcagtcaacaggttaatcagattagtcgtcgtcgaactcatccacgaataaaaagagacctctccccaagccacaggcggaaaataagaacgcgccacataaagcagtcccaaccctgcgagggcaagcaaggcccaacggttcagtcggctacgaaactcatccatacgctcgaacagacgaatgcgtcctacgatgaaccctaagatgaaaagtcccaaggtcaagtaaatacgcccgctcgacacctggaagcgcatttttccgacgatcccgtcccaagcgttactctcgatcgtttcagacaaggtcgggactttccgaggacctgccggacgggaagcaggcctttcggcaacacgttccacctgctcgaccgccggagccgtcaggcttttataagctaccgggacaagtgtcgccccccctaagaaaagaaacagcgtaatccctgccaacagcttggtcggccatttatacatcaacaccaaaacaaaccccagtatcgcatatatcagcaaaatatccacccggacaatcaagccgtgtaaataaccgatcgccaacaaaagaaccagcctccacaaaaaacgtggacggaagtcaagtcctttcttcgccgcccgatccatctggataaagaaacttaaaccgaacaggcaagagaagataatgaagaatttcccgaaaaccagataattgataagccaactgaaaatctcgttcatcgttccctcccacgggaacacagcctgagacgtcatcgtccccatagctccaaaatgttgcatagaatgaatcaggcaaatgccgataagagaaaagccacgcaaggcatcgatcactgtaatacgctctccgggagcaagcactgtttttgttgtttccatattttcaaatttcagatttgatttttattcgttttcttccgggaacaaaattacagggcatcactcgaacagaaggaatacaaattacggttttgtggatattttttactgtagaacggctcttggttcggaatgaatcacatagtgacctgttttaggattcaagagaaacaagattgtaaattaattcgtatgtttgcagccgtaacctaaaaaaataaagacaatgacagtaatcattttaatagcagtgatcgtgatcctggcaatctggatcgtttctttgtataattcgttagtgaaattgcgcaacaaccgcgagaacgcatttgccgacatcgacgtacagctcaaacaacgccatgaccttatcccacagttggtcgaaacggtcaaaggctatgcctcacacgagaaagagaccctggaacgcgtcattaacgcccgtaacggagcgatcagcgccaaaacgatcgacgacaagatcatggccgaaaacgtcctgacttccgctcttgccggattgaagatcacgctcgaggcctatcccgatctgaaagccaaccagaacttcttgcagttgcaggaagaaatttccgacctagaaaacaaactggctgccgtgcgccgttatttcaattcggccacgaaagagttgaacaacgcagtcgagacattcccgtccaacctgatcgccggtatgttcggtttcaagaaggaagtgatgttcgacctgggcgaacaacgcgcgacactcgaagaagcacctaaaatcaagttctaaggatgcaatacgtcggtatacaaacccaacagagcaggaacaatttccggtccctgctcctgctttgcttgtttccctgcctggtaatgggattgctttttgcgttctgctacctgctccacctgttggcaatgaacgacgacggcctgacgggggccgaactgctcggatattccaccgggatgttcatccatttggcgccatacgtattgggaggtgtactcatatggttcatcatcgcctattttgccaatacaagcatcatcaactcggcaaccggctccgaacctttgtcgagaatggaaaacaaaagggtatacaacttagtggaaaacctatgtatgagccagggaatgaaaatgcccaagatcaatatcatcaacgacgattctctgaacgcttttgcaagcggcatcaacgaaaggacttacaccgtcagcctctcgcgggggatcatcgacaagttggacgaccaagaactggaagcggtcattgcacacgagctgtcgcatatccgcaacaaagacgtgcgcctgatgatcgtatcgattgtctttgtcggcatctttgccatgctcgcacagatggccatgcgttccgtctactactcgtcgatgagccgcaggagagacgagaaaaacaacactgcgatcatcatcgtcttagtcatggttgttgcagccatcggttatttcttctccatgctgatgcgtttcgccatctcgcgcaaacgggaatacctggccgacgccggagctgccgagatgaccaagaatccgctcgccctcgccagcgcactgcggaaaatatcggccgatcccgacatcgaagccgtcaaacgagaagacgtagcccagcttttcatccagcatccgggccaacaggccaaaagcgcactgaacggtttaagcggacttttcgccactcatccacccattgaaaagcggatacaagtactcgaacaattctaaatttaatcaagatttaatatccctaatcattccaatcccggcattaatttaatatctttgatgccggataaaaataagtgttggaaatgatacaaaaagaattgaccggcgatcttaagctgaaatgggatcgcatacaacaggcgatgcggaagataaatgccgacggatgcctgcttaccgtggatgtaaatctgtattacacaaccggacgtatctatagcggctatttctatcttcctgcggaaggtgctccgtggttcttcgtgaaacggccgaacggactggcaggcgatcatgtcgaatacattcgcaaaccggaacagatggccgagctcttcgcgttctacggactggaaatgccggaaaagcttctgctcgaagccgacgaactgacatacaacgactatatacgtctgcaaaagatcttcaatccgaaagagaccggaaacgcaaccgcaatgatgcgtgaactgcgccggataaagacaccgtacgagatcgaaatgttccgcatctcggccgaacgccacgccaagacatatgccgaaattcccgaatgtttccgccccggaatgactgatctcgaattccagtatgaaatagaaaaacggatgcgcaagaacggttccatcggactgttccgcgccttcggagccaatatggatatctttatgggaagtatcctggcgggagaaaacgccgaagtcccctcgcctttcgactttgccttaggtggtagtggtatcgacgcttcctgcccgttaggtgcaaacggaacgcctctgaaagaagggacagccatcatggtagacatggcaggaaattatacggcttatatgacggatatgacacgtgtgttctccgtcggccacctgaccgggcttgcttaccgggcacatcagacagccctccttatcgaaagcgagatcgagaatatcgcccgaccgggcacaccttgtgccgaactctacgagatagccgccaaaatcaccgaaagccagagactcggcgcatatttcatggggaccaagcaacaagccaaattcgtagggcacggcatcggcatccagataaacgagctgccggtacttacgccccgctcgaaagacatgctggaaccgaacatggtatttgcactcgaaccgaaatatgtgataccgggtatcggcgccgtcggcatcgaaaatagtttcctggttacggaaaccggactggagaagatcacgcacttcacagaagatatcatacaattagacaaataaatcataaatcataaatcataaatcataaatcataaatcataaatcataatgaaaaaaacaatctcacttctcctgttactgtctgtcatcttcatgccggtaaaggcacaagatgtagaaaacgtaaagccggtgaagaatgtcattcttctaatcccggacgggacatcactggctacagtctctatggcgcgttggctgcaatggtataccaaccccgacaaaccgaaattgaacatcgacccgtatctctgcggaacagtccgtacgcattcttcaaatgccccgatcggcgactctgctcctacaacttcctgctacatgacaggacaacccagccgtacaggctacgtttccacttatcctgagaacgacggtgacaacgatatctacccgaccgatccggcacgcgctttccaaccactgacaaccgtcctggaagctgccaaaataaaacagggcaaatcaacgggactggttttcacctgcgaattcccgcatgcaacaccggccgactgctccgcccacagctacaaccgtggcaaatatgaatggatcgctccgcagatggttcacaacgacctgaacgtcgtgatcggtggtggcgccagcctgcttcccgaagagagcgaagcctacctgaaaggtaatggatacggtattttcaagaatgacatcgacggtatgcgtaattacaaaggcaacaatatgtgggctttgttcggagatcgggaaatggcttacgacatcgaccgagatccgagccaacagccatccttggaagagatgacacgcaaggcaatcgaaaagttatcccaaaacccgaacggtttcttcctaatggtggaaggcagcaaggtcgactgggctgcccacgcgaacgatccggtcggcatggccacggatatgttggctttcgaccgtgcttgcggtgctgccctcgaatttgcccgtcagaatggcgagactgccgtagtgatcgttcccgatcatggcaacagcggtatcagtatcggccgtgccgactgtaaaggttacgataaactgagcaaggaccagttgtttcatcagctttctttgtataaattgacagccgaaggctttgccaagaaagtgaacagtgtaccgaattccgaagtgcaaaacgtcttccgggaatatgccggcttcgaactgacacctgaagaactggatgccttgaaccattgcaagaattacaaaaacagcccgatcccggaaaatgaacgctcgatcgaaggcaaaggctctttatacagcagttcgctgacgactttcatgtccaagctgcttacctccagaacctgtttcggtttcacaaccggcggccacacaggcgaagaggtgttccttgcagcttaccatcccgaccgtacaagcttacctctcggtatgcacacgaatatcgaactgaatcattatctctgtgccctgttcggcatgacacacgacacgctggaagaactgacagccggaaacttcgctcctcacacggaagtattcaaagatttcaaatgtgaaatcgttccggctaaagacgagaaaggttctccttcactggtcgtaaaaaacaaaaggaagcagatcaacatcacgccgttcagcaacatcgtgacgatcggaaagaaaggccgggaagaaatccgcctgaattcggtaatcgtatacgttgacaaaaacaatacattctacttgccgaccaaactggtagaatatctgcaataaaaatagagaagagggtggtgtgcacaccacccctctctcgtgaaatttatcttccccataaacctgtcttcctcctccaaacgccctatttacataatatacggcaataagttatagttatttgttttttttcaatcattcttttcttaaaatatctatactgtataaatatggaagatttatatagacattcagacaaataaaaccgctctttttaaggtacatttgcgtcatttttaatgaataaaacgaatatgacaagagcaaatgcaaaatggatacggctgatggcagttatcggctgtacgactatgtggatggcatcctgcaaacatgcaccggatgcacagatgaaagcatcttacgcgacgatgaaagtttctacggcaaacaaagagctgacaaccccttattcggccacgatccgcggtcgccaggatatagacatttatccgcaagtatcgggaacgatcgaaaggctttgtgtaaccgaaggagaggtcgtacggaaaggacaattactttttgttatagaccaagttccttacaaagctgctttaaagacagcccaggcaaatgtggaagtggcaaaagcagctttagctacagccgaactgaactacaacagtactaaagaattatttgcgaaaaaagtcgtttccgctttcaacctgaaaacaagcgaaaacagctatctgacggccaaagcacaactggcgcaggcggaagcacaagaagtgaacgcccgcaacaacctgtcttatacggaagtcaaaagtccgtccgacggagttgtcggtatgttgccttaccgtgccggagcattggtcagcgccagtattccccaaccgttgacaactgtttccgacaattcgaacatgtatgtttacttctccatgaccgaaaatcaattactggctatgagccgccagtacaaaagcatggacgaagcgttgaaaaacatgccggaagtgtcgttgaaactgaatgaccagtccatttacgaacaaaaaggaaagatcgaatcgatcagcggagtgatcgatcggaagaccgggacagtcggcgtgcgtgccgtattccctaacgaatcccgcctgcttcatagcggagcctccggcaatgtgctcataccgcaaacttacaaagactgtatcgtaattcctcaaggtgcaacagtccgtttgcaggacaagacgcttgtctataaagtggtggatgggaaagctgtttccacattgattactgtagctgaaatcaacgacggtcgcgaatatatcgtacttgacggattgaaggttggcgaagaaatcgtatccgaaggagccgggttagtacgcgaaggaacgcaagttaaataaaggatcgaagtatgaaaggaaatatatttatcaaacggcctgttatggccatctccatctccattcttattttggcgatcggactaatttcgctctttaccttgccggtcgagcaatatcctgacattgcgccgcctacggtccacgtatcggcaacctataccggagcggatgccaatgcggtgatgaacagtgttatcatgccactggaagaaagcatcaatggtgtggaaaacatgatgtacatgacttcaacagcaaccaatgccggttcggcaacgatcgaggtatatttcaaacaagggacaaaccccgatatggcagccgtcaacgtacagaatcgtgtaacgaaggcacagggtttattgcctgctgaagtaacccgtatcggtgtcagcactcaaaaacgacagaccagcttcctgcagatcgacgcacttgtcagcactgacggacgatttgacaagacctttctcggaaactacctcgacatcaacgtcatcccacgtatcaaacgtatcgaaggcgtaggtgacgtaatggagttgggtgatacctatagtatgcgtatctggctgaaccccgaacgaatggcccaatacggcttggttccatcggatgtgactgctgtattaggagaacagaatatcgaggctccgaccggttcgctgggtgaaaactcgaaaaacgttttccaatatacgatgaaatatcgtggacgcttgaagagcgtagaagaattccagaatatcgtcgtccgtgctcaggaagacggttctgtcttacgcctgaaagatgtcgctaaggttgagttgggaacattgagttacggtttcgacagccaaatggacggcaaaccagccgtgacattcatgatttaccaggtagccggttccaatgctacggaagtcaacgaacgtattgccgccgaattggaaaagatgaaagaagaattgcctacaggtatggaattcatcacgatgatgagctccaacgacttcttatttgcttctatttataatgtagtcgaaacactgatcgtggcgatcatcctcgtaatcctcgtggtgtatttcttcctgcaagacttcaagagtaccttgatcccgtctatttcaatcatcgtttcgttgatcggtacattcgcctgtctgaccgcagccggattcacgatcaacattctgaccctgtttgccctggtgcttgccatcggtacggtagtggatgacgcgatcgtagtggtagaagccgtacaggcgaaattcgacgcgggttacacctcgtcctatcaagcgacgaaagatgcgatgggtgacgtgacgatggccgttatctcttgtacctgtgtgttcatggccgtgttcataccggtaactttcatgggcggtacttctggtattttctacacacaattcggtgtgacgatggcaacctccgtaggtctttccatgatctgtgcattgacgctctgccccgccttgtgtgctatgatgatgcgcccgagcgatggaaacaagagtgccaaaagtttcaacggacgtgtacgtgcagcctacaatgcctctttcaatgccgtgttgggcaaatacaaaaaaggcgtcatgttctttattcaccaccgctggatggtatgggccggaacgatcgcatccattattctgctgggatggcttatcagcaataccaaaacaggtcttgtcccgcaagaagaccaagggaccatcatggcaaacgtggccattgctccgggtagcacattggaagaaacgggcaaggtgctggacaaagtagagaatatcctgaagaacacgcccgaagtagaacactacgcccgcgtagctggctacggcttcctggctggtcaaggtacttcctacggtatggcaatcatccgtttgaaaaactgggatgaaagaaaaggggccgaacatgtttccgacgcagtagtagcccgcctaaacgcacaattcgcccaaatcaaagaagcgcagatattctgcttccagccgggtatgattccgggctacggtctgggtaactctatcgagttgaacttgcaggaccgtacaggtggagatatgagcaccttctatggcaatgccatgcagtatatcggggctttgaaccagcgtccagaagtagcgatggcttacacttcttatgccatgaacttcccacagatatcggttgatgtggacgcagccaaatgtaaacgggccggcatttcaccttcgacggttctcgacgtattgggtagttattgtggtggcgcatacgtttccaactacaaccaattcggaaaagtatatcgtgtgatgtcacaagcctcaccagaataccgtcttgacgaacaagctctgaacaatatgttcgttcgcaacggaacggaaatggctccgatcagtcagttcgtaaccctgaaacgggtactcggacctgaagtggccaaccgtttcaacctctttagctgtatcacggtcaatgtgaacccggcaccgggatattccacgggtgaagtgcaacaggccatcgaggaagtggctgcccagatgctaccgacaggatacggatacgagtatggaggtatggcacgtgaagaggctaatacgggaggctcgcagacactctttatctatgcggtctgtatcttgcttatctacttgatcctggcttgtctgtacgaaagttttcttgtgccctgggccgttatcctgtctgttccgttcggtttgatgggctcgttcctgtttgccaaactgtttggattggaaaataacatctacttgcagaccggtgtaatcatgttgatcggacttttggccaagacggcgattttgattactgagttcgccatcgaacgccgccgtaaagggatggggatcgtcgaatcggcttattcggccgcacaagcccgtttgcgtccgattttgatgaccgtacttacgatgatcttcggtatgcttccgcttatgttcgcatccggagccggagccaacggtaacagttcattaggaacaggtgttgtcggcggtatggcagtcgggacattggcattactgttcgtcgtaccggtattctacatcattttcgaatacatgcaagaaaaaatccgtccgccgatggaagttgaaaccgatatgcaagttgcgttggaaaagcaaaagagccaaaccgaacgtgagggtttaaacaatgaaaataaataaggtatgaagaaaataatcgtattaacaaccgcaaccgccctgttgagcagttgcggcatatacaccaaatatcaaccggccgagacgactccggacaacctgtacggagaagaggtggcagtcgatgatacgaccaacttcggtaatgtgaactggcgggaactttttacggacccgcagttacaggctcttatcgaacaagggttacaaaacaacaccgacctccggtccgcccaattgcagatcgaggaagcggaagcggcgttaatgtcggcaaaacttgcttttcttccttcgttcgcactttccccgcaaggaacgatcagcagtttcgacggtgggaaagcgacaaagacatacacgctgccagtcacagccagttgggaattggacatcttcggacgtctgcgcaatgccaagcaacaggccaaagcactgtatgcccaaagcaaggactaccagcaggctgtgcgtacccagttgatcgccgggatcgccaacgtatactatacattgttgatgttagatgaacagttagccatttcgcaacagacagaagaagcctggaaagagacggtagcttctacccgtgcattgatggatgccggattagccaacgaggctgccacttcccaaatggaagcggcttactacagcgtacagacttccattcttgacttgaaagagcagatcaaccaagtcgaaaatagtctcgccctattgctcgctgagacaccgcgccgctacgaacgtggaaagctggccgaccagcagctcccggaagacgtagcagtcggcgtaccgatgcaaatgttatcgaaccgtcccgatgtacgtgctgccgaacgttcgctggaacaagcattttacgcgaccaaccaggctcgtgccgctttctatccttccatcgtactgagtggaagtgccggatggaccaactcggcagggagtatgatcgtcaatcctggcaaattcctggcttcggcagtcggctcactcacacaaccgttgttcaataaaggacagatcatggcccaataccgcatcgccaaagcacaacaggaagaagcaagcctgtctttccagcaagccttgctgaatgccggcagcgaagtcaacgacgctttggtcgcctgccagacaagcaaggccaagaccctcttgttcgaaaagcaaatccaatccttggaaaaagcattggaaagcacctcgttgctgatggaacatggtacaacgacctatctggaagtgctgaccgcccgccaatccttgttgagtgcacagctgtcacaaacagctaatcggttcaccgagatacaaagcgtgatcaacctttatcaagctttaggcggcggtagagaataagaaaacattttttatccataaaagccaaaaaccttctaaaccggaccttttacctattccataggacctgtttcagaaaaagtatccaaacttcgacgaaacaggtccttttttatcaagtgaaaaataagcggagccatgacattgtctattcatttttttatacttttgtgggcataagacagaatatacacaacaatgaaaagtaaaagttattgttcaattattagctaatacaccgtattttcacgtgaacaaaacatcaataatttactaataaccaaccatttaattatacaattaaaatctttcagctaattaaataatccaaacacgtacatataaaatatctttttgacgtacttttgtgtactattttttttacaaatgttttacagcgcacgattatggctacattcaaatttttggtactcccgcatcaacggaaagaagatggtacatataacgtaaaaatccgtattacacagaaaggcaagtccaaatacatcaagaccagccacaatgtatcagcttcagatattataaaaaagaaagacaacggaaaagaaaaaatcaagatcaagaatcaagccgtaatcgacctaatggaagagatgatattaggatttaagaaaaaattgacatccgcaggtgttgaagcagaacactgggatgttgatcgaattgtggagtacttgactacagaggaaaagaatttcagtctgaatttcatttcctatggacgaaaaatagcggatgatcttgagcaagatggaaggttgggtacggcaaagaactatcggatagccataaatgcgcttgtcaggtttatcggaaaagaagaactcgacataaaccttattacagcatcttttatgagggcgtttgagaagtttctgaaaaacgaaccttcttttaaggggtgtcgcgatggtggatcaaaacctattgataagcctaaaggtaaacggagcatatctctttacacatcacaaatcaaaacactacacaacctcgctaaaaatgaatataacgacgaggacagaggaatcatacgcatcccattttccccgttctcaaaatacaaaatcgcaccagttcccaaaagtgagcatcgaacattgtctatagaccaagtgcagcaaataatagatcttccgtataaacaaaatgctcgcaatggaggtcagcctgttttcaatttagcgaaagacctatttatcttatcatttgcgatgatgggcatgaatagtgctgatttctataatgctcctaccgccgaaaacgaaattattacctatcaaaggactaagacacgcacaaggcgtgaagataaggcagaaatgaaggtcaggattgaaccggaaataaaaagcttgtttgagaaatactccgacccatctggagagaaagtctttatttttcataagtggtatagaagttcagagaatttcaataaatcaataaataaaggattagatgagataggaaaaataataggggttccagatctgaattattattatgcccgccatacgatggcaacgttagcagcaaataaggctggaattgatattgccagagttgatgaaatgctaaaccactccgattcaactttaaagctggctcgtgtgtatatcgaacgggactacagtgtgctttgggaagccaacaggaagttgttatccttgtttaaatgggatggcctaaaataaatcagatcgatcaattaagcttatccgaaaaagccaaacggatctttgcttggaaattctttgcaggagagtctttcgctgattggccaggaccagaaaataggaaagatttatatgaaacctataaaagtgttttcaatgcggtgatggataagaaggatgggaaactgctgttttaaaaaggaagagcgtctgaatatcactatctggacgcccgaccttaactatgaaaaatacgtttttcgtttgtaaatgtacgtgatatactgatccattatccgtaggatcatatgttagtaaacatgtaactcaaatatttcacaaactgtggcttaacttcttcgtatagatacttcaacattaagtccatcaattccaaatccgtatgttccataaacaacaaagcccacatttccgggagagcattcccgtactctgtaggctctttgtaccaattggtatatcttttctaaaaatcaccgcatgccctcagatcctttcagtttcttatctcatagcaaatataaggaaagtttttgtaatggcaaaagaaaagccagcttttattaagccggctgtatttttaagtaattacttttttgtagaatcggttttgtcgtttttaacgaaaatggaaacgattgacacaaatgttcctgctcccaatattcctgcaaaccaaggcttgtctagatacagtgcataaccacttaacccgactaacacaacaatagaaagaaaagcaaagaacattccccaccaatttacccgaaaaacacgacgctcatttttatcaacaacacgtaatttatctctttccattttatgacgatgttcttgttctttctttgatacatccattaagaatgtaacaatgttgggatcaatcgcctgataagcggttagttcttctgcagaaggtaagcaagtatcatccaccgtcaatgtttgttcatactgcttaccttcaccattggggctgacgacagccgtttcttttctttttaattcttgcttacccattatgtaactgcaatttgttgtaagagtttcgaatgtcacgatttacattctccctgtccttggcaagattacgcttgtcatcaacgaacgaaccatcatcttttgaaaataactctttttcaatagagcgaatggcttctgattgacggctgtaacttcctttcgaagcttcattgaaaacagaggcgccgtttttaacgaacttgccgatttctttgaatatacacataatacctccgtttttattaaattttacgttgcaaatctacacaaataaattagaaatgtgcaagaatgcgttactaaagtaatataaaatctatactttttgcagcaattcttatttctggcatattcaggtagactttcaatagtataacaaataaacccaaaagtaagttgcgtgaatagcttcatatctatacaaaacaaaaccgccccaccatcacaggcagagcggccactacactattaacattaaatctataaaacaaaaagaaactaccaaatcctatagaacccacctatcccgacatacggcgacagtccatttctcccgataccatacccggctgtaataccgataccaaacctacgatctacaacctttgtaatctgttccgtttttcgatagatctcgatgtaatcaagattgggtttgtaaccggatatggacaaccggtaatcttctgtccggtattccttctgtgttatgggaacggggatatacacaggttctcgtatcgtatcgccaccaagtgtgatgtagacgggaaacagttccggtaccgtctggattactgtttcataaaccggataagggatactatctcttatcgtgtcgacacggatgaatgtatcggttttgcatataaaaccaacctctgctttcttcgtgtgacgaccagtcaggaagcatagaaaacagaggatcagaatcaatatgatatgccagggtttcatagcaggctccatcctgttataacgtcagacatatcagcttctaccccattctcaaccttactcattccggctacaatacgaatcatcggctcacggtcatacgggttgatcggatcatcggccggtatcccggcgtaaccggataccgccttgatgtaggcttccgtatggttgttgtcccccggcggtgcccaacgcccgaccatctttcggatggtatccagcttgtatatgcacaagtagttccgaagtatcttgaagatagcccgatacccatacgccattgtttcaaattgtttgaatgacttgtcacggctcggtcttacttcgccttgaaacaaatcgtcgtttattcggatatttccggggttgttatttcttaaacctcttggcaaattattctttttcatttttattttcctatatattaatacccattctgcggttcacgatcaccgcacttctttctctcacatctcttcagtgcaagttcaagcttgacatccgaatagctctctttcaaagtaaaaagctcatcctgtacctgtcgaagccttccggtttgttctacaaaacgttcttctttttctgatagctgtttttgcaggaactcgttatactcacgtaaagccttgaactcctccacatcggcatgggcgtcctcgatacgggcgtttgtcttccggttcgtatagaagctaatcccccattttatcgcctcgaatcctcctaacgtcccgattattgttagtatatcggttaattctacattcactttacacctccttctgttttatttgatcatctttgttacgagttttttcattgccataaggcagtgtttgttatttctccgcctccggtctgtgatagatgagaagcggatttttatattattcgcccggttgctcctcttttagcggttcatccaaaattttgacatacgtcggcatcgtgaactcagagaacatgccgttgcgatctatgaagtcaacacgttgtttgaggtattgaagttcttcgtctgtcaaaacgatatctgttgtttccgttatggccgctgcatcggtaaatccgatgttgatttgaccactccccatatccttgataacgatacgcttctgatcaacctccgagatcgctatcttactgtctatcgatactttcagttccatgttttttctcgtgtcaaactgtggtaacacggtgttgagtattaatactctgtctttcaatgttaaattcatcttcttattctatatataataaacctgttgcactatcccattttacattatattttgttccagatgtatctaaatcattaatctgggttaacgttggtaagaaacttgcttttacacaagtcctaaatacccatgaggcatcagatttaaaatgtctgacaaaaaaacttatttcccgataagccgttgcatcaggattgtatttcattacaataaattttccgatattacctaaaataccttgataagttctttgaatttccataccttgagcttctcttgctgcaaacagattaacatagttattattccacgatttgtcggttaaataaatgcttgaaaaattagatgtgcctccattgagacttatagcatttaacattctaacattaacatctccactttggtcaactctaaaatctgcactttctggaactaaacctccagcccaaaatcttatagaactattagatgtgccatatcctgtaatcccagcttgtccatttcttaataaaatggcatcatttgctgtaatagtcccatttgaaatcacgttacctgagctatcaacgctaaatgtcggatcagtgggtggttgccctttcgccccggctgttcctcccgaccaaatacggattgtaccagacgccgacattccacctgtgcttccaaaagcgatcgcacccgtagttatgagtccgccattgatctctgttattgtattgtcatactttgaggcaagaacccatttagaaccgctatatctatagatattctccccatccacccataagtcattcgttcgcatacccgatgttggagccgtcgtttgataaaatacccttgccttgttatttgcagtcaattgggcgttgttggctacatttgacgcattctctgcatccgtcagggcatcatttaccccatcatacaacggttgaaggttaggacggtcggaaatgttattataaccggatgttccggatttgaatatcacaggtccggttatagtcccattcaccagatcaatcaccaatcgggctaacttgtcctttatcaatcctgtcgtgatcgtctggccggcaatctcagtgtatccataattcggaagccaagagcgtacgccatcctccggagtattgagcacccctacccagaaatgatagaaccctgtttcatcctctaactttatctgccgttcactgacatatattgagccatttgttccttcttttggacatttggcataaacataataggcaagcgaattattcagccggaaagaagccgccggaatagcccattcacggatttcctcgctaacggtaaagtgtactaactttcctgtcgtattcttgaaatagttggcatcattgtccgcattcggaataaacttcatccctataagctccatctgctgggaattggtgccgacgataagttgagccgtatgcacggccaacggcttgataagttcagtgaaataatctccttccgggtcaaacatcatgcccaaagtttccatcacgtcccgccatgaacgtttcgtatgttcccgaaccggcttaaccgcatcctcaatctcttccggcactttattcacatcatccaccagatccttaaaaccattcgattcaaggaaatcggacaaggtaagttcataccggtatgaaggtgtaccgtctttctcgatatacctttttattttggtaacacgaatctctcgatcgatatccaactgttcagaatatacgccaaccatctggccacaggcgataaagatgttttgcaaacgaaaaacaatttcatcacattttcctcgtaactggatgcgtttctcacacttgccatccaaccatgcttgcgcctcttcctgtagctgtaatgaagcgttatccctatagctttgcggcattttcaggccggtaaggataaacttgtcaccgacagaaaaattaatgtcaccgggaactttcaaggcgttttcctggtcattctgctttagtttgaactgtttcaagtcattgtcccaactgtcttcaacgattgcaaggtcatagccagccaagccgccatcctggaatgtaacgatcacttccaccccgtccaacaggcaatcggtaagattgaaatccataccggcagctctcagagtgtaatcgtcgatcttttctgttacggcaaactctcctttcggaaagatatggtcgaattgcatggacttttctatccggccgtacttctctacattcttttcgatagagaaccggccatcaggcagaagaagataatcagcaccataatcgggaccgagattcttatctgaaccgtatggataaaaaaccgtcacaggtggcgtatcatcaacagcagacacttccagttcggtaaaacccattccttcgccctgtgccaagacaaggccgttgcttgaatactccctcctgccgatatttattgtctggccggatatccagtattccgtatccaattctttaatgagttcgtcaagtaccgtcccgactttcttatctttgaaagaaagggtaaccatccgggattcgatacaggatccggccacccaaccagatcctgtacggttcatgtttttgacaaatagggttagccagtcacgggcggtaccggtgtaatagtcgaagttctttttccgctccggtgtaccatgaaggaaaaactctgcatccaaaaggtcataccgacttgaatagaactgaacggtatattcccaaccaagagatgtctcccttttcgtcaccttctcgttatgccggaccttgtattttgtcccttcaaagtctatatagtcattgatctgaagctctaccacattacgggaaagaaaattcaggataagagtgtcctcccccatgatctcttcgaccgtataactgttatctttcagatagacatcacagactatcgtatttccgcgctttatttccatactgctaaataacctacttatttttaggcaataaaaaacacggcaaccggatatatgacattttaccggttgtcgtgttttaatatataaggcagatgttctgtttatggtagatttctaaagcgcaagtccacacgcgccaaaagtcgtagacaacgctgcaatctcacaccagaacatcggcttcgttgatacaaagtcctaccatatattaccactcaaccgtttactcatgtctattaccgtgtaaacgataaaagccagccacaccagaataagaacccaccagaaagacgtgcagccaacccatagctgagaagaaagcaacgtcaatgccgccgatccacaatgaatgcggtttatccaagtgtctttgaaatcaggagccaaaccgacaccaatcaaaccgatacaggctgcgatcgccagcaaccgcatagtaaaggttgtactcatttcccaaatgaccgggaataggaacatagccgtcagtgccatgcttgctccaaagatcaatttatgatcaagagtataatacgtcgcactaattgagtacggtacaccttttgcctttatacaaactgctgccatataaactgcgataaccaaaaaagaaataattaataataacatgattttcaaactttattgtttaactttgtttccggagaccctcggtccccctaattttctttttttacagcctccaatctgtgatagcctggaggctgttttttgatcggttataaaggcgcaaaagcacgaaccaaggctttaccatactgtacgtagctatcagcatatccattacctacaaaatacgtccaagcgcttatgtcatcgtattgcgtactggtccaataagaaaaggtgctcaactcaactcctcctataagagacatataatatcctatatcagtaagatatccatcaacataatcccactccccgcaagcccccaagtagccatttttcccatttttgaacaaatattggttacaccatccggctgcatggctccgttctctgccgagtgcctttatcatggctgttgagttagctacgcctgcataatctatccgagctgtatcccaatcattagttgttgttacaccgggtatagtgggtacatcaacattccaccatagctctgtttcactttctgtcggagcaattacaaatctgcaggcattgctgataaatgcaactcccacagcatcactattccactcctttttccacatcttttctgtatataaccgattatctgtccttagaatgtaaactccattaggtgcaccttctatcgccataccacctttcttccgtcccatcatcgatcttatcataccaacctcctttccgccgaaagtcggtcagatactttagttaagaggtgtttacccccccctcgttaacatttgtaaacaattatttctcatgactttatctcctattttttagtcgttaatatcttgtttcatctttttcaacggcagatcattcttcgtaagcccaatagcggatcaggacagtgccatcaccgccgttaccgtaagtaccacaaccgccaccaccgtaaccgccactttttctattgccatttccagttccgcatcctttgtcgtaatcggattctccacccatgcccccattcatatttctgtctgaaccaccacctccggcatttcgtttcccagtaggttcgccaaaatcgcgggttgtatgcccttgcccctttcctccgccatacaaggagccggctggataacctgaacctcctgctccatcagagccatcagagcccgctttagctgtatttgaatcatctcctgctccgccacttccgccgttgccaccagtatatgctccggcatcacttccgcctggataaccattacccgcaccatttccgccattagctctataacttgaatttaagaattgagagtatccaccgttgggggcaacttcagaataccctccaattcctcctttcccaactgttatcggaattgactgacccggtgcaacagagatagcatcaccgtctctccatccggatgtatcttttttgaaggttttagtatagccgccacctccaccgcttccattatgtcctgcaccccctcctccgacaagaaacacatcaacctccctacatcctttaggtacgatccaggtataattcccggcaggatagaacctcttggtgaacaactgcaacttcttccgtcccatcatcgaccgtctcatctacgccctcctttcttacgataagaggtcgtaacttctttatttagagagcattttacccccccccccgtttaacttttaataacataacctgtttcattgctttacctcctgtacaattgtgggcaagtctttcaagtcgttcggataacctgtaacggttgtcagaatgcagagatagatcacaccgtattgttcataatatttgtctttctcgaatgccataccctgcacgtatggaataggatcatcaagcgtgcctgcgtgctcagcttcaacgatcttatacagtgaagcagtttctatgcccggtttccagtcggcttgcagcttgtgcttttgtatcacttcaaacaaagtgtcgctttctccttccactactcgaagccggaagcctatttcaacttccttgccaaactctgcatctttctcaccccaaatggggaataagacctgcatctccaacgcttggctggctgtgagagacacgctgttcatcatcgcacgggcaaaggtcactgcctgcgcttccggggatttagcgattgccttatctgctttagtttgcaaggctgccgttgttgtatggatcatttcaggatagccttccaccatgatagcttcgacctcctcggctgtttgggcggcatcgatacgggatagcaagccgtctgtcaccttggcgcactgctccgaatagtcagctatttcgtcaagagcaaccgttaagatattcgaggcgtacagatgaccgcctacttcgacttcttcctgccggccacacttatccttcacttgcagggtgttcgagacatatgcgtcctgttcatcaatataataatgatggatgtctttgtcgtagatttcctgccgtttggcatcacgggcacgccaaagcagttcttccggtgtcggctgtggttccggtgtcagtgccatgtaccagcattccaacggtgaagcttccggatagtcgttatgatacttctcctgttcttcgttaagcaagagataagcaccatcttcaaactcttcaagagttgtgcctgtcttataggaagcaggtaagacttcttctataggccaaaagtttatttgtttttgaatgtatagcatgatattgttcgtttttaaattacacatacggtttagtaggaggagtgaagtttgatgtccaacgggcgatatcacttactctgaattcatctatttttgattttatagaatatagaggatcaccatctctcctgttttgtcctcctaatcttaaactataactcggaagaatagaacttttcaaaagaccttcccctttcaaatatccatcgataaagatcataacattccaattatgacataccactgctatatgtgaccatttttttaaagttggatatgtgtacgtgggaataaaggattcagatgtattatcggcatgaaaggttatacccaaaccattataagtatataaaaatagtgctccacattgtcttatactgtctcctgcttgggtgcaaccgaataataatgattcatttctttcattaggatatatccaaaaatcaatagtaaaataccctgtagatataagattagcataccaagaccggtccaacaataatactccatttccaaactggccacaggacttgaatcttccattagaaaggataattactgatccttctttagagacagattttcccaacatatcgtgaataggctctttatcaaagtttaatagaaagaccgtattatcatcaggcataccaacattttttcccatcatcacccttctcttcatctctcacctcctttcattatactctcacgacaattatcccatgttcttttttcagcgatacccctgtggctttaccagctggcagttcaacgcttgtttcctccgattgccagcccgaaccgtttgggatcggttggttaatcgttgatccggtattgttcttaatggacagataaaattcctgcatctccggtacgcttcctatattcgcaaagttgatcgcctgcacagatgtactcgaataggtaaaacgcaagttatacggtgatgaaggaagtgactttaaggtactgacatcgacatactctttcaacctcaaagagtccgataccttcgttttctcttcattgctgtaattattgtcggtatggacataagcagcgtccttgaccgtatggtcgtcattctgtaactgggatagccttgtcggaatcgcctgctggacgtttgtgatgctctggttcagcccggcaatgatcccttgcaacgtctgtgtgtcctctacgttggcaagaaaagcgatgatctcgttaaatgactcgatggcactcgatgcgtcacccgaaacgagcgtgttgacctgctgctgcaaggctgtcagcgcgttcctgatttccgtgtcgtcgtagctttccccgtcctgtccttcggctaccacacccgtatcctcttcgcctattttccaatgcttggtttccggatcgatcgaaggaaccggggcatcgtttccccgaaggttcggggtgtcaaacttaccttcagccgtcgtgatcgtcaggatataggtcgtggcatcattcgttttaactgtgaccttcacctcctgcatgacggccggcaactgggcaaacgtatgaacgccatcagccagcttcatgttgaatttaccgttttccaaacgttcaaataaccagactgatgtagggtagacggttgcgttatcggcccattcagccgtcgtcagttcgatctgttgataaataaatgcacctttcttactcattgcttaaatatccttgttttatcgttcgtactgattcattgtaataattggctcctgtcagataaacattaccgggcaaggctgtaccgctgccggattcctgccacgaggcttttcccccggcaagatcataaagccggtagaatacatattcgccatcttccgctacacgcacatcatcaccgatacgaaaattgatggttgtaccgtcggtattgacatagctcaatgtattttcgtccgggatagcctccaacgtcgggatctccggtttgttcttgatgtagttcttattgacaggatcggtaacgttccagtcgggttgtagtccactgatgactccttcggcggcttcggctgcacgattggcgcggtcggcggctgtgttggccttgccggttgcgactatggtatcttcctttgctgcattagcagccaaagcagccgtatccgccagccctgccttttcattggccagagtagcggcaacattggctgtatttgccgccttgtctgcattttcttttgccgtgtttgcggccaaagctgcatccgtcgccgattttgtagcagtctcggcagaagctatggtatcatccgcacgctctacagccgcattagcattttcagcggcagttgtagccgaggatgctgcttcattcgctttatccgttgcggtattggcatttaatgttgctgtgtcagcctttcctgcggcatcattggcctttcctgcggctatattggcttcaacagttgctttatctgcttcttcctttgccatattggctgaagctgctgcggtatcggcattctcggctgcggtattggctataccggctttttcctccgccaatgcagcggcagcaacagccaatttggtcgctgcatcagcatctccggcagattgagttgcttgaccagctgcggcatttgctaaagctgcggcatcatttgcagccttggttgccgcctctgcgctcacttttgcggtgtttacattcgatatagcagtattagcttcctccttaatttgggacatctgttcacgaacctcttttgccgcatccgttgccggcttcataagttcggccttatcagtctctgtcagatcagaaaaatgcagtttcaattgatccacttctgctggcgtcagatcggaaaacttcattttcaattcttcacggtcgaaaatatccacgtatgcactatccggctcaccttcgtatttcatttgaagcgtaccgttcaactttcgaaaaaccggcttctctcctttcggcccacgaattttctcaatttccaacagattctgccaagcaccattagctccttgtttccaaaggatgtatttatcgtttatccctaaaaacgcactaaggccgggatcgccctgtttacctttcattgcagagggcaaagcacgcttaggtctcccaccctgaatgatcaggatcatatcattatcggttattgttccggctgccggaagcaaattagccctgattatttcaaattcttctgccatatcaattgaaaactattattctaccttgctcgtctgccaataaccccaaatccggatccttcagcacacggtaacgaacatcaccgccggcatctatccaactcactacgggagcaacaacagaaatagtgaatcttgcccctatccggttctcctgccagacttccacagaaaaggacgggcaatccgtatagtacacctgaatgataccatccaatgtcttaatatataattcctgatttcctacaccggatatctggctaaagaatgcccgatagttattcagaaactcttccacactgccggccaacatccaaagggacagttttatttcccgatgcagggttttgattgtcgaaaggtctaccgtacggccatcggtgaacggcgccttaaccgcaggatatttcaagatgtcctcctggttatcgtccgatcctataccgaagtctgcaaagtctatcccattaatcgcatactgcccgcgaagcccgataccgccggccggagttgccggataaatggcatgattgtcctcgacaaaagaaagttcaaacacagatacgttctcccctgcattaaatggcacaggctgttcgtgagaagagccggcattgaatcgtaagcggttggtcataccggcaataagattgaattcccgatagcccggtgcggacagatcagcaacaaactttctatacccagaccagaactgctcaagcgtttctgccttcatgaggaatttcaacttgacggtcttaggttcgaactccacaaccgagagatcgggatcgattccgtcggcttccgcccagttgttatatttgactgccttacgtttggggtatttcagaagatcatcaaaagaaccttccaataatttacatccccattcagtatatacgtcttttccatctattgtcataatacacgtgctgtatggtctttatgagttattaccttaccgccagcgttctttacgaacaccacggcatagttactcgcatggatctcggcttccgccccgtgcatcaggatcacgttgtagcggccgatcgtatcaaaatgaaggattgccttggaaccggccaagaataccttcaccggattcgtcagtttcacgtccgtctcgatatagatacccatgctttcggccttcttgccccggaactcccgtaattgttccatagacgggaaattattcttcgtgcagaactccgtaccctgcggcgtcagcagaaggcgcataagctcttctttgttttccgtgccatgcaacaacctacaggcacctaaccggtttgcgatctcaaaaaactctttgtccatcatgttacatttttacttttacgttaatagtaccttccagggcatcaaccgtgcctctagtgttctccgatatcttaccggcaacctctttgatctctctcgtattctcggcgatccgatcggtattcttttccactttatctgatagttcgcggatggccttcacatcttcccaacctctggattgcatatcatagatcagcctcatttgttcacggatcggttgcataccgccacggatatcttccagcaggatacggacggccccggtctgtccagccaataggtcgatgctttcctgggaagctttggcatacgcgcctttcagggtattttcggatatatcttcttctttctccggctcttccaccttatctttcatcaggctatcagcccaaccgaactgcctgtcaatctctttttgcagttcttccgccatattatagatataatcctgttcccagccggaaaggacattgtcggcatagaactccttcagcttgtcacgaatcttctccattgcaccggaagattccgttgcagccttgatggattctgtgaccatctggcgcatcatcttcttgacggtatctttcgctgattctgcccggtcctcaccggaagcccacgcttcggcttgtgcgttagcgaagttgtcaatggcggatttcaggtcttcaccgaagatggcatctttggccttctccttgttttctgctatggcttcgttaatctcgtcaatttggctttgccattcttttatcctatccttatcggtattctttttatcctgttcttcacggatttgttgctggattaaaactttctgttgttccaaaagtttgttctgctgatcgatcaatcgggaagcatcattcgaataagccttctgaatggatttatccagtttttcgtatgatttatccaatgtatcaatctgatcctgcaaccgctgaatacgtttttcgttcttcttgtcatggattttggcgatggcaccggccaaagatgtaacgacaccaatggcagcaccggcagacgcaccgatcggaccgaacatggaaccggctttcgcaccgttcattgcagaacttacagtgtccatagccacactgaaaccttcagctatcccaccgaatacaccaccaaacgaatctccgagcttcgaaaacgtatcaaaaaggaactgtccggcctgcatgatctcattcataccctcctctatttcagccaaaccctcttttaacttcctggtatcactttcagaggtaaatactttttttaggccatttgaaactttattaaaagaggtttccatttggtcggcttcacgacgaacattggctatttcatccttgatggcctttaactgatccggtgacttgcgaagcacatcaaactgctctttggtaataccgaatgaattatcagaggaatattcccctctttcaagaaaagacaagaatttttccgcttcatccgcaatggcacgaatagaggtgatattctttttactcatatcatcaaacagccgggtgatgatggaggtgctcttttgggcttcattatccacgtccgccagctctttcttcataccttctgcaagggaaagccgttcaccttccgttgtggcctttgctatcttctcattataaagctccgtgatagcctgacgcttttccaaatatgaaccatattctttcaggtattcgttcatggcgcgtttctcttcctccagttgttccttattcacattggaggtcgattgctctcgtttaacgtatgaattgaccaaagcggtatgaatctcgaccgtctgttctttgctcagtttgccgccttgcgcgtctttccactctttctctttggcgagtatggctgcaatctcattgtcatagtcaagataaatttgggcaatcttcttgtcggatccttctttcatcaagtcgatttcggactgttgattttgacggcggaaggataaaagttcgttatgaatcgttttttgctgtttgagttgcttatccgcctctttcttttcttgtttttcgcgcttggtcgaatcagaatatttgtctatttgcgtttgcgcctcttgtatctgttttgtatacttgctccaatcttcagagttcttttttgatacatccaaggcattacgagcagcttctgcatcctgtttctgcttctcccaataggatttattctgtacaacagagatactattcctcgttaatgaattgatctttcctgttgtctcatctatctgcttattcaaagcatcaagcctgatactactaatgatatcaggaacacccacccacacagaagctatatcctctgattccgtcaaagttttatcaagttcatccctttcctcgataagttttcttttcacatcctcataatgcttaaccttctcttcaacaggagtgttagcctcccattgggcttcttttattttatctatttcttccttatggagttttgcaagattattagcagtatcaagttgcttattaagtcgttctacatcatgaatccatgaattaccagatttattgtacggagaagattctgtctcttgtattttctttttaaggtcctctattcttttcagatcagcctcataagccttaaccgcattgtctatttctctcttctcattgacagatgataacatcttattttgctgatcctgaggcaaattcttaaactcttcgagactcacatttccaagttcgggaaacagttttatcagctctttgtatgccttaacctgcgaataaacagattcagtctcactatttatttttgaaatcagactgtctgttttagaggtaagttcctgtttcctgtgcgcggcttcttcttgttctttattaagttgcttttgggctttctcgacagcggttgtactatcatgaagaacccacatagtagcggtaaaactggctacgatggtggcaagtaaaacataaggattagctttcattgccgcatttaaagccaattgagcgacagtctgcgcttttgtcataattgtttggattccttttgcggccgcatctacccttgcggcaacagcccaactacgagttaatgtaatactggctatcaaagcagtccgataaactccataagtagcagccaacccagccaataccttacctatcgtttcatagttttctatcaacgaagtggttgtttggatacccttaattatgacaccctccgatttctgccccaattcattgaatactgaatccatcgcatcttgcatcatggatagctgaccgttgatagtttttgaagcgttctcggacatattataaaatttaccacttgccgaagtagcatctataaacgcctgttgtaccatttctgcggaaatagcccccttagacatctcatctttgagcgcagcaatagattttccggtcttatctgccatgatttgcaacggattgaatccggcattaatcatctgattaagatcttgccccatcaactttcctgctgccgacatttgagagaaagccaacgtaagcgagttaaacctttgggtatctcccatagagacatcgccaatagcctgtaaataacgtggtactttctcgacctcgatattaaagcctaacatcatctgcgtagcttgggttacatcagaaaactcaagaggagaaatctttgcatattcacggacttgtgacataagttcatccgccttttctttgcttccaagcaaagtttgaatagcggtgtctgctgcttgaaactcgccacgaacacgaaccatgtttgacagaaactccttaatggagtatcctcccaataattttttgccgacattagacatcgcttgttctatctgctttgtcacaccgacattctctataccctcctgtcgatataaagtatactcgtcacgtagtttttttaccgatagtcgtgcattagcctgttcttgcgttaatccaaataaagcagctttctctccatccaaggccttgcgtgcagcgttgtattcttccaatttctcattagcggacaatggatttcttttcaatgcaatacgataggcctctccaagtcgttttacatcagtctctacatctttaataacagctttttgagtgataattttttctgataatccgtttacaacttgcgaagcatcgaatattttctttttaaaaccttggtttatttcattgcctgcacgtactgcggaagtgacaagagaatccaattctttcgtatttttagcaagttgaacttccattgcccggaaagtagccggagaagtattactatccatcccggcaatagtagattttaacttatctatctcttcccgtaacttaatgactttttgatagtcagcttctatgtgaaacgctaatttaggcatacatcaatgttttggataaaagtacatcagaccaataaagtagtagaattttatgggaatagatacatgacaatgaaaagattgtcgtgaatatagaatcatgctcctcttttttgtctcataagatcctttcccgacatcttttttacttcagttttctctttgtcctcatagacagccctcggtttatcagcactcatcaagagcaaaagaagataaggaagatcctcatacacctccctgtaagaaaggttcaaattttccatgaataaggtaatacttcctacgatggtattgcctcctactacttgggttttactatcagatttgccagctccatcgctaactggcagactacgaaaaaatcacgtccggttattaactcaaaagcgacaaaatacgcttgcaataattcttctttagaacctgaaagcatctgccgttcgaggctttcagctcttttttgataattcgggacatcaccaaccaccaagaatgaaagtcccttgacgatattctccaaattggcaggagcgaccttcattaattcccgcacagtgccattctccggtaaatcgaccttacttaaatattgggtagccctcattatcactttgatagaaggagctttgattacatatactgttccccctacaacaatagcttttccataagtaccggaaagtaactctgatatgttttttgaaacctcactcatagtttaaatattagagggtgattgctcaccctcgtcattaacttatccacccaaagttgtatcctccccgtcttcccagcgctcaataggaacaccggctttggttggtttcaacgccgtaaaaacaagggctaagccaattgccttttcattcgctttaccagaagcagaaacaccggcacgaggaaaaataattttcacaccatcttcagttgtggcacggacggtaaactctttactctctacatggtcggcacgctcccatgtgcccggcttactctctgaccccgccgtaaacttaccaccttggaatttagccttagtctcaagatcatacataccaatagaagcattgatcttaaccgcacccggctttttagaggaataataggtatttccagctacatctttgtaatccttaacctccggatcttcatcctcataagtgaaggtgtcctcatgaactaccgggacttcttcaaaaacagaaccttcggcaccaccagccccgatcggcgcaacctccagcttctgaaggtttaccaccacaatttttttattctctgccataattatctcacatttaaaatttcaaacattattttcacattcacaaaatgacactttagcggtacatctctttcttgatgggtagaatagactttgtaacgataggtagaaccgtcaaaagaggaaacagaacgtaaaccagacgcttgccgctctaattcggttaatctacttttgtttgccattccattaatatcaggtacacagaaattaacttcaacgaaacctttaatccaataagttcccggtttgggttctttcgggataacggttatcctttcttcggtaacttccccttccggtattgcgtccttcttgtaagtagggataccaaacggcttcaagtcccgaaccaaaatagtttctatgtcgcctgttactatcattcaaacttttcttttaatcgtttctccgcttccaaggcggcaccactcaatacttcaaatccttttgcttccacataagatgcgtattctgtctcattcttcagcgtcagtcctgtttcgtcaacctcgtattcattagattttcgaagtgtaccggtgtgatcctgataatccccattatccttagcgtactgaacagcatcctctcctacctcaatcatcgcttctttggcctcttcatagaactcatcaaaggccgcatcaacatctgagaagtcaaaatctacagccatatttccgcatacttgaaatagttagacttaccggacttgatgacctttccttctgctctcacactttccccgtccaggattctcacctcggtaccagcatttagtatcccaccctcatagacaacatgataattatagtcgtacattaccccgtttacggagatttgcttcatcacgccattatcatcacaccggcaggaaccaaagtctttccaatcctctttcggggggagcgggttcatatcctcgtcaaatgacggaccggacacgaccttgaccattaatctatgtggagcgaatatcataagaacttgactttgggtttatcggtattgagttcgtctttcagtccatacttcttgcacaagaaagaatagtagtccttaatccctttaatgtcccaagacattgagaaaccactttccccaatagatgtgggccgaagtaaaagagaggggatgaacttcgccatcgccacagagacacgatcgtagcaatcctcattcatctcatcctctccgcttatcttcgaggtaagacacatatccaaaaggtcagcctccgacaagttaatgccgaaggtctggaacttctgctgtatgtagtcgtttaccgtcatcttaatatggtgtaatcagtttgctatatgcggtatagctataatggttcaaatatttcgacttgaacacgtatcggaacggtaatttagggactgaaatttgttttccttgaatagccgtttcctctttcatcgaacacatcatagccgggttatttgcaaccaaaaacacgggatgcgtcatggtcagtacaacacaatcagccggagccgtttccaaagtgataaactgaatatctggtaaatcaacatcaacggatagattcatatattcacacttgggagattccacacttgctgcctgcacgctcaacgaaaccaaagacatcattaaaaagccacacatggcaaaaataaaattcttcatttcttttctgatttataaaattagacaatggaagggtagaagcactaccctatccttttactcgatacctaatgcttctttcagtttggctgttgattcttcatccagttctgcaaccttagccaaaagagtttcctctttcatattgccggaagcctgtacgccgatggacttcaaagcatcaaccaaagtctttttctcgaactctttctcaaagagggagattttcacctccttcttttcttcaggtgctttcacttcgggaagttttgcctcaatccgttcagcaagtctgcggctttccatatccagcacacgagattcttcagcaacttcaatcacttcaccgggagtataatactttccggtgaacttgtcgcggaaaactgatataacctttactttcatatcctacctccttatgctgattggatggatgcaatttcgctcaaatcgaaattagtaatcaaatctggattggaaatctgcggaatccactctgccgtatattccatgtagcgaccgtttttgtcacgatagttagagataaggtaagcgtctccgcgatgctaccattgttcttcaaacaagagtatttagctttgtcatcaaaaaaagatgaaagcagaaactcgttttccccgtacagtagaagcctacaaggcacatttgcatgaagatcgccctcattacgacagttttcaaaccttttgccgtaaacaaggggtacgttataaaggagtgatgcaatggatgcatcgtcataatcgaagcgtaggaagtttacgtttggaagtattattggaaaaaaacggtaatgacagtaacttgaaaagttcacttatagaagtgtcagggcaaagctttccgatcaagaactcctgcatatcctcacgcaatattcctttggaccaatatatcaaaggtgcgatcctctctttccctgacggtgtatccattagtatccgcgagaccaccccttcggccttaatgaagctttttgaattatacacccaagtaacaggcaatccaaatgtttagtctgaacgaatccctgcattattatctttacccttactatatcaatatggggtgtggaatagagattttatccgaactggttcgcaatacaaagacaggaaacccactcagcggagatgtctatttgttctgtggtaaaaaacgggacatgatcaaactgttgcgctggcaggaagacggatttattttatatcagaagcgtttagaggacgggacctttgaactcccccgttttaatccccgtgaggactggaataagatcgaatggaaaacgttcatgatgatcatgtcaggcatctctctgaattcagtgaagtacaggaaacgccttcgtttgtagtccggtctattgatttgtagggcgccgctttataaataaaagcataaatattttgccgccggaagaactatccgtatctttaaggcatggattacaagcggattgccctcttattggaagaccagttgaaattggctgcgcagcgggaagaggagttgttgaaagtgatcgcagatcagaatgaacagctcaatatcctgactgcggaagtcaaatccttaaacagttccatcctctcgttggagaaagccctgttggaaaagaatgcatcccttgaaggccagcaaagtaaagtccgcatattgggaaagatggtatcgggcaagaaatccgaacaggtctctgtccccgataaaggaacgacaatcatagccaaagtaaaacccagtctgaaagaaagagggaacaacggagccagacgcaaagaatattttaatctggaaacctgccatcatgatatctatccggatgcagcagagttcaaagtggaagaaggcaaaaaaatacgtacgacagattgcatccgctacgaatttattcctccccgttttatcaagcatatctatcaccagcactattatgcctgtaaaggcactgtttatgccggaagtctgccagctgtccccttgttgaactctaattatgatgcatccttcatcgccggtatcctgcagttgcgctatatctactccatgccagtcgaacgtatcatcaaactcttcgcagagcatggctttgagatgaataaagccacggctcatggactgattaaaaaagcggccggtctgtttgacctggttgaagatgttctcaaagagactgtcctctcggacaattatctgagtatggacgagagctattataccgttcttaccagtgatacaaacaactcatccggcaaatccacagccaaaggatatatttgggcagcactggctaatcatctaaaactggtacatttcttttacgaaaacggttcacgttccagaaaggtcctgaccggttatctcagggaagactaccggggagctatacaaagtgacggattaggaaattacaagataatagaaaaagaggcctatccggatgccatccgcctatcctgtttccaacattgcaaacgcaagttcctgaatataacaggaaacaaggatgctgaaaaaatcgtacgaatcatcaatcgcctttaccaaaatgagcaccgcattcccccggactggacagcccgccagatactggactatagaaataaatatgctccccctatcctcaaagaattaaaagaggaactgataaatataaaaaacaaaaagtcgactttacccaaaagtgaattaagtaaggcgattaactatacgttaaacgaatatgatgctttatgcaattatatccgcagtgcagactatgctccggacaataatgcgattgaaagactaatgcgatatattagcttaagccgcagaaactccttattctgtgggagtcatcagggggctaaaagggctgcactgatctactcactggcttgttcgtgcaggctcaacaacattaactcatttgagtattttaaagatttgcttactaagctcattgatataaatcccaatacagaccacgagactataagaaatttactcccccataaatggcaaaggtagcatcgcggagacgattacgagataagcatctgcccctctgacgggatataagtacgtccttgtactgggtctgtcgcttcatacggagtatgatgacgcatataaccaatgttgtcagaaggtaacagagtaatacgattatccgcgtaaatctgcacgttttttcccgtctggtctttcacgtagtcctccttgatttcgatgcgaggtagaccaatgccggtgaacacttcggaagccaaagaagaggaaaccaatcccgtactcaacttcatctcattagaaccaagaatcatcttgtattgctcaccaaattcagatgaaccaagaataagcttgttgaaagatgcacgggtcattatcatcttggcataaacgccaaaatccggtgccaaggaatgaagtttctctctcaaataagagataaacatattctttccgtccacaaccacatctccacttttcggcttgataaagttgaacggaagggcaatctccagcagtttattattagtctgaccggaagtgattgcggcatctttgttgtaaacggtggcttcaccaagcatcaacagcgcaccgacaataatatccatacgcttgtgggcagcaagggtaatctgacggtagtcgtctgccaggaagtttacaatatcttccattgcagccttttggtcggctggcttagctgcattgaacttgtcaatcaaatcctgcaattcggaaagacggtcaatagacatctgataagcatcacccaaataggcaatctcaccatatccggaaccgatattcctgcgttcacgaatgggcttttctccaaaacgagaattgatggagccagccataactccggttacagaaccgatatagtctttgaacacacgagtagtcactctgcggaaagtaagatactgctgccaatagattgtgtccttgcgtgtctggttcacacgtctgatgatagcggaaacaatgttcgcatcatcgaataatgtttgaatcgttaaaaacatgtcctacctccttactcgttaaactcaaaccatcccttcatgttggctttatcgttctcggagaacggcataaccaattttgagggttcaatttctgcggctgtacgaagcaatgaaaccaatgtgattccgtcctcaacctttgtacggttaaacagagccgaattagctacatgcttttgttttaaaccatcaactgcaaccgcattgaataatacggcatctttggcgatattctcaccaaaagcagccttaatagtcaatacatcataaccggcattagatttatcaattgccgttacttctgcgcctttcttgccgcttccgacaaacatacccacataagccaaagagttcttggctactttgatagacaaagcctctccaccagtggtataggcttccacaactctcacattgattaccgcataagcgaacttgtttttcaagtccgcacaaatcggtgtaaatccgggaagaaaacttcccactaccaggttctgcgtatcaagtttgaacggaccacgtctacgaatgccggtctggacatcgtagcgttcctcttgctcaacgggcggaaccaagtcatacttaaatcctgctgacataattaattcttgttttgttcaacaatagttttcgtcccctcatcaatcatcttagcgatagattcagattctttctcaatcttcgcttccgctgattcgggaggggttacgcctttgaagccgtcatttgcgaactcctgcttcaaatccttgaagtatgcgtccaagtcctcatcgtccttgatggcgcatcgtttggcgtagttttcgggaataccatactcctttgcctttgccaaaatctgctggctacgtgttgcttgagccttctccgtttcaaactgtgttagcttatcagaaaggctcttgttggaatcaattaaagcttgcgcccatgcaggcacatcgtctttattctcttccgttttagtggttgtggtagtctcgattggcttaccgtctttaaggttatgtttcttctcgtagttggaaactgcggtcttggaagcatccccggcacggaaatcgccataggaatttaacacgtccgaaaaactgataccctcaacgatggagtttacctttgtctcgtccgtcacaccctctgcctttttggtggcaattcgggttaagatagcagtgtccacccctgtgaatttctgttgtagtcctgctaagatttgttctaagattgtcataccgtatgaatttgatttataaatttctacggtaaaattcgatcttaataaagagaatgagaaataatcaggatagttatatacgacaatcagactattgtcataaatatgacaaaaaaaggcgtgaaaccgaatgaatcacgcctaaaatatagtaagatagtatgcctaaagttttacttctaatttttgacctgtcaaatcaaaatacaggttttgaagttgatggagggatttcacttgtatattgtaatcgactcccttcaaatggaaatctgcgtccaactcaaacaagggactataataagtgacaactccccatttatgcttttcaaatccacacttcaacaacagttcttctgtaagaggaatgggattaaggttctctacataggtacgaaataccgcttctgatgatattccactcgcttcatattttggatattcaatctcactatatcctatttctgttatcttatatggagttttgctattttgtaaatagacataattaccaattttcaattctctaacatccaccatactataacaaatttatagccgataactcctttgtcaatgattgaatacccctctgaattttctctaactgctgcctgcgaggtttgtgaactccggcagcataatgccacaactggcgttcattgattcctgtaatacggctcaatgcagccttagtaaagatattactgtaatagttgataaaagtagcagcatcaatcttaaactttaactcaaattctccagaaagcacctcacaaggattagagttatcttccaaatacaattcgatagcctccttcatgttatcttccaactccttcatgtcgttaccgactgtaatgacaggagcatcttcaatataagcacttaagttctttcctgcgtgttctacaataacttctactgttttcatattacctccttttttaattaagagaacaagggggctactttagccccgcttgtctcaaaatgctgtaataagtgcctttctcaacgcctttgctgttatgattcggtacaataaccactttgccgtctttctcaaacttcatgtgactacctttctggctctttagaacaaaaccgttttcttgcaacatagttacaacgtctttaactgatttgtaactcataacgctttggacttaattaccatgcaaatatagtaataatacgaatattatcaaagcatttattcgttattttactatgaatataaaaatagcggtaactccgaagaattaccgctaaccattctatttttcttatactaaaattataaacctcgtaatttttctgactaagaggcgtttttctttcccttatctccgatttgctcattctttaccccttgttcctccttgatttctgcaagttcctcttctaccctatcagcatttccggcaaacatgattccctcacgcgttgaccagatgccaccactgacagcggaaacggcagtagtcaccttatcactttattttaattcgtcctattcgcaccaaagtatcataatcacgacatatgtttttagtactattctgtattttatcaactacatcataaaaatgatcaggacattcgatttcccactcttcaggcactatttggcgattattcccaatgggaaaagtgtagcctgctattaaatcttgaaagatatcgatactaacataaagattctttttcaatttttcaatatctggatttataaattcaagtgttggattatctttaaatctaaaaaagaaattatctatttgctccaaatttttcaaatcaaaactaaaccctgcaaaattattagttctaaggaaagcaatagacccctcaggaggcaaaacttcttttactattttgtcatataaattcttatcatgtaaaagtgaatctgcatcatatctaaaatccgtttttatccatctacaataaatacccttcaatagaacatataatattgccatagaaaataatatccaaacgtcgatagggtaggttaaaataaacactatagattctttgtaagaatttccacctataatagtatttagcaatgctcctattggaggtagcactgacaaaatcaaactagaaataactcctgcgcctacaggatcattccatattcttttaaagaattctttcttcatactaattatttaagcatccctgctaaattctttacatcctccgcagactttacttcatgcacggtatcacccacttttacgaagccgataacattactggcattcggcttttcaaatagttcggcaataggaacatttaatgtattcgcaatcttttctaatgtttgcaactgcggatattcccctcgtaaagtcttattcagacttatatcagatattcccattttttctgctaactctttttgagttataccttgcccttgacaaagttcttttatccttgttctaaagtccataatactatatagttttattcggcaaaaatagatatttataccacataatacaattatatgactaaaataaacctacttagttttatttttaacattatttattgctttagatattgcaaaattaaactaattagttttactttgcaatgtcgaattaaacgaagtagtataatttaaaacatataagagtatgagtacaaaatttaaaagtcagatgaaagaagtgatgcaaatggcatggtcttttgttcgcaagaacggttattcaatgagtgaagcgttaaaatgcgcatgggctaatttgaagctgaaagcagctttaaaagtgaagatagtagagttttacttcaaaaagactgacggcacgttacgtcaagcctttggcactctcaaagagaatcttatcggtgaggtgaaaggtacaggcagaaaactgaatgataatttgcaggtgtactttgacactgaaaaagaagaatggcgttgtttcaagaaatgcaaccttgttaaaatcgcataataacagtggtaaacgaaattaagtataaacacataaatataacgaatatgaaaacagaagaattagtaattgacatgaataacctttatgtacaaggattaatcaaagtgataaacgactttatgcttgaagaggcaagcggttgtatttttacagaagaccgtttgaaaagcaatattgagaagctgaaagacgtatttccagaagaacgcaaacggatggtaatagcagggcgtgcaccaatgttctcgtcaccgacttcgggtttgtataagctaatatttaaaaactaaacatacacgattatacaaaggcaaccttagcacgacctttgaaggctgcctttattattcactcttaaatgaaataattatggatgaaatttggaaagacattgaagggtacgaaggcgattatcaagtatcaaatttaggtagggtaaaatccttgccaaagaaatgctggaacggtaaaggatattggtttagagatggacgcattttaatacccataaaaagcaaaaaggggtatttgaatgtatggtgcagaaagcgcatatttaaagttcatcgcttggtcgcaaatgtttttatacctaacccgcaaaacctaccacaagtaaaccacatagacggtgataaaaccaataattgcgttgccaatcttgaatgggttactgatggtgaaaacttactacacgcatatagggttcttggtagaaagcaaaagactggcaaaaaccaccataattcacgagctgttctacaattaaaagacggcaaaattataaattcatttgatagtttgaatgaagcggcacgcacaactggtgcgcaccattcgggcatttcaatgtgttgtaatgggaaaataaagaagcacaagggctatcaatggagctacaaagaggagtgatttcactcccctatctttatggcttgtttctgcatttcagcttttctcttttcttcttgttcttcttttatttctgaaatttcttcttcgatgcggtcaatatttccagcaaacattaccccatgtcgttgcgaccatacaccacctgacacagcttttacagctacattaactttatcttctaaattgtcaaggcgatacggaacaacttctgtactaatatctatcgtttcagatgctttgttaaattcagatggatttatagaacctaaagcagagactatgaagttcacacgcctttgcaagaactcacctatcacctcggcatgattttgaacttgcaaatgtgtcgaaagaaacacgtaatcgaaagccactcccgacaaagcatttccagcaccgctcaacttttcaaaactgatttgcggtgtattcgtcatagaatatgctttctcaaagagggtttctacctcaaattttacggtgtcatttgcttggttccacgtcagatactgggcatccgcaccttcacctgtaagtttgaccattctatccttaaccttacccatgaaaccctctacatcaccaattagcttcaatagtgggaagaaatggtagtctatacaatcagcataattggataatagtttctccaaccggacccggaaggtctttatcttcttgcaataaggttcaggacgataagcatagagaaccggtagttttgggaatccatgagcaaaaggcgttctttcttcataccctttagacaaatcccattgataaaccattttgtccgtgatagtcataaagcaggtgatctccgaatcatccatgagcttctttttatactcacgtgagaaagcaatcattttaccttcatcgttaaagaacgggtatagcttatcacctctgaatggagaccataacacgcttttcagtttcttggtgggcttgaccttgccaccgaacgtagtcttaactttcttccaaaactttgcccaaaacgaatcatcatcggtaacataccaatattctgccgcttcttgttcggagagccaggcacggacaatcttcttgttttggtatttgattttgttggatttaaatacagcctttaccgcatccagcagcttcttttcatcatcatcagtcggaatgcaatccatagacggttctgtgccgaccgtgaaagcagtttgaatgttcactatatcttgttccaatggaatagaaatacggttcaccggttcagtcttatactttgcttcgatttcataagtcttaccagttttttcatcgaaaactttttcggattccttatcaagtacttttctgtccggatacttttctttatccacaatgatttcgtggcgttccggattccaatcatcccaaagtttgcaacggtcgggaagttcagtcttcctacctttcttcaggtagtttatcttctgcccgatgtcaggcaatgctaatatttcttctaaattcaatggcatagtttatatttttaatgtgtgaatattcctgttaaatctttcggcttctgaatctgaccaagaagctcacccaatacatagtaacgtacagcatctattccgtgattgtcatggtcttccggttcgttgatatagttcccgtccttatcctttgcccaaacatactttctgaactcgctttgcaagttgtacgagcgtttggttatataaatctccatatctttcattttgtcaattccggcattgatagagcctgcacctttctctacggcatatatcttgattcctccgttgtgtatctcttgaatcaaacgtggatctgcgctgtcagcaatgactttcaatccccacgggcgaagagtcttgatgatgtcagaagaaagcaatccagtacggtaatccacttcatccaagtaaagggcgttatcaacgataccacaacgaatggaagcagacgggtcatgcgtataaccgaagtcttgcccgaaagcaattttctttgcccaagccgggaactcgtcaacaattccccacttcttgaacacagcaccttctgcaacgtcagcccaccggccgataaccacatgagcatacttttcaggattactcaccttcatatcttccacctctttcaggaactcaggagaaaggttatccaagttatcaaaatacgtagtatggatatggagcacattcggatgagtggaaatctgaacctgcacaccgtcaatctctaccagcttgtgagttttctcaatgtatttcttgtagatgaagtgattggaatcgcatgggttcattataatgataatccggttctgaatacccttcttgcgaatggagagcattatcttgtcgaactcatcttcgcttgtccactcttccgcttcatcgcagacgaaagtcgtaatgccttgaatggatttcagttttgctgtctggttcccggaagaagtcttgataccccgaaacatgatacggctcttagtcatcttattgactatgtccgtctttgtggtcttgaaatatttcgtggtaccgtccaaatctatcttctccatcatttcggggatgatagacataccggcagaaaccatcgtgtaacgggtgtaaagaatctgatgcacaatcttctctacaggagtcatttcaaaagtcaaccgctcaataaaagtagaagcattgaaagactttccgctaccacgcccaccggtaataagaattataaatttttccttatcctcgtataatggatggtaaatttcttggggtactatcattttagcttgtctttaatccaggaatcaatgttgatgccatgctctatgtctgttggaatatcagcgtcttcatcctgcttgcgttcaacctttctccaatcctcatcatggtgatacagccaaacagacattgcttgcaagtttggtgccaactcgctttcgctaacttgtaattcatcttcgcccgtcaaattcccttctgaatcacggagctttcttaccacggtgcttttggtttttatgccaccgagagccattgcaaggaatttagcccttacagtggcattgattgtcgcgcgcccacgcgctaagacttcggatatttcggtgtactcacttttcttttcgcagaaagtttgtggtaaaatcccaatggcataggcaatttccttatcagtgaatccctttttggcatacgattccacgagagaaagaaagtcctcgcttgtataatcaaactttggctttcttcctcctttaccttttctattttgagattcactattgctcatattacttctttaattttccacatttctcacattgttcatacctgaactcagagaacatcacactacctttccaaacataatgatgaacacaaaacaggttttgctttagaacattccttatccaaagtataaaatcgccaatcataattttaaccgttattgttacccatatatacacggcgagaaattggcttgtttccatagacatcaactcctctttttgagaaatagctatctattttctcagcatatcttcccattatagatttcgttctatcccttatgtttctttgtcttgcagaacctaacccgtattgcccttccagcgttgtacattattcgtctggactgctgatataactggctatatgttttctttctaactcagctttcctcccaataattaatctattctttctacttgttcatcaaatacttctccctttatgaacttcatatccggatcatacccgaacctttcgcagaaagcggctttagcttcataggtatcaaaggacaacatcacataggcatccatgttctcgacttgcttctgtgcgttttctttcacctgatgcttgacctctttcatgtgggcaaccttttcggcacgttccaactgcttggcggctttatcggcttctttctgttcggaaactgggaccatcatatcagacaaagcatccgcaatagagttttcctcttcggtctgcaaaagatagtcgacaccaatcatattcaagtctgcatcggtcagacctgcatctttccagtcaatatcaggaacaatacgggcaagagcgtcaaaatcccatgtaccttgtgcattagggttgttcattagaatgtttaactccttttcctgctgctcgtccacgtctatgacatcgacacgaatacggtagtcattatcggggaacttctgcaattcatccatgacagacaaacgttgatgtccgctaactacggtaagcccggtacgcttattcacaactattccacctaccaatccgaatttcttgatgccacgtttcagtgtcttacgtgattcatcagatagttttcggggattataatccgcaaagtgaatggcagaacgattaagttccaccgattcactctttatgtattttgataattccatattagccattacttagaccgaaacctctctgccgaagagtattcctttcggctcttgctataagattatcacgagattgttttgcacgcctgcttgcggcactgctactccatgtattttttcttctccagttagcttcgctcaatctttctgcctgagcatatatctgttctcttgtctttctttttctgactcagcaattctccttattaattttgttgattatgatactcccaaagcgctctttcagccatcgggaaaactctgtaaattctctgtaaatcttgcgggtaattcttctccatccaaagcatacaatcaagattgaaacctactcccgaactggctttcaatgaataccgaactggttcaggtaaattgtgctgcctcatataagcaagaatatccttttgtgtccaatcagccaaaggataaaccataccgttattctcgtaaccgtttacctcataccctttcaacataagcctacgattcataccatcagcttttttcatgcccaagaatgtataataaactccatgagtaagctgcatagcctttaccacatctgccaacttcaatagctttactttcggatttggcacacaatacataccgccacggagaatataagtaaggttccaatgtggtacttgaacaaactctatcttcggatacttggctttagtccagtttatccaacggttaatatgctccaaattcttgacaaagtacatgaacacgcaaacaatccggtcaaactttggatagactaaatcaagcagaacaagcgaatccttaccaagtgataaaaacagtaaagcctcattcgattttacccgaatgaggtctatataccggttcgctcgttctaccttgttcataggttagccaccgtttaatcccattgaaacacgtaaatcagcgtaacgctgcctacgtgaacctaactgcgtagtacttgctgtacctctacgattggcaaccaatctaccacctgcccctgcaccattcatatttctgcgaggcccggctactctgttaattcttcttgcgactctgctttctaattttaaaagttaaacaaatcaatctatatgtttctctaatatcttacccaaagtataatccatttgtgcggcaagatattcttcgccttgatattcgtaaacaatatcattaccgttttcatctgtgagaattactgcttctgcgttctttacctctacaatgatataaggacgcttgcccgtatatgcacctgtcagaagcttgatggcatcatacttgataggctttaattcagcctctccttcttcaggtagttctgcatcagccggatattctttgccaccacagaggtaagtgatatacttcttagcgttagttggtctgatttcacggtattcgtgagttttcttgcctgctaagatttcatcgaaatacttctgtttaatcgagagtgttaaaatattcataatcgtgccatttttaattgaataactaagtagttgcgggtaacggattcgaaccgctgaccttcaccaagtcaaagtgacgagctgaccactgctctaacccgcgatagcgccactaaggtacaaccataaccaaaaacacagaaacatcttcaatcgttatttatgacaatcgatttattgtcgtaaactaagccatttatcccgtttttctctgcacgcctctaaagtaggcgcacagcaagaaaacagttcaccactttcagtacggtaatcgtactggtacattctcactctcttacctcgcaacttggtgttgtaggtagtataattctctttaccgggctggcatacgctgcaaccgttttcgtttattgagttcataatcaatcttatttaatgtttcacattcaaccgttcttcactcgtataagccactacaagcccggtttcatcatgttgtatcgtgacatacttttcgcctctttctatggtagaaaaatcacacatagaacataacttgcctaatactttgcccaattgtttcatcagtgatgtttctgggctgataactaaaactaaatctgctttcataatcgtatgtatttaagcgttaatacctattgcctttcttacgaagtcaccagcctgttctactgacatattcaacttcttctgaaccaagataagcatacaggctacttgctcttgtgtattcagattgccctgcgcaaactctgacatgatgaacttttctattgttctctgtttaattactgatgttgccataatcatatatcttttaattgttattacttcttgtttgatgatgcaaatgtaaatgatatatttgacaccgcaaacaaaataagaaataatatcctttcctttaactttattttgtaaatgatatatttgacactattataataaacgtatctttgcaaaaaaacataatagcatgaataggatagaattacttattaaagaaaaagggtataatatgacatcttttgccgaaaaaatgaatactacaaggcagaacttatacgccatattaaaaagcccatcctacccaacgcttgaaaaagtagcagaagctttggacgttcctatgtggcaactctttgcatcaccggaagaagtgaaagatgatgccaatactatcacctgccctcactgcggaggtaaaatacatttcgatggagaaccacgtatgccagaacataaaaatatacgagggaaagaatactataaataaagagtaatatggaaacattagaaataatatatataataattagctttgttttcggagtctttgtttccccatatttaaaaaggactatagaaaatattgcagatactcactggagttatagaaaagaaaaagctaaaatgaagtctgatattgcaaacaatatagacaagcagttatttagacttctaataaaagcacaatacgctctaaaaaaagaagatatagactattcattacatggttgtggttctgcttttaaagacatatctaatcttatcgaatatcttgtacaatttgaggaaagatacaagacggataaaaatgcaaaaaagattatagaattgcataaagacttcgataatcttaagaaagacagtgaatgtaatcgaaggattgaagaacctgagtattatagaattgcaaatgaagtatataaatactctgataagattttacagaagaaatttcccaaatggtaaatagagctggagcactaaactggcttactcattgataacctcattaaaagcaataaaggcgcacccaaacgatgcgccctctcttgtcaattaatctttgattttatattggagcctcccggctggaatatcagaatctgacagcttccattcttttgaggatattattataccccttttggattatagccttttgcttttcggaagctgtaacgatctttcctttgtattttcgcataacggactcgttcaatccaatttcctttgcgaacttactggcatttatgaaagggaatgcctcgaagaatccactcaaatcataaatatacgaaacagaatagccagacttataccacacaggaaactcaccatgtttctctttgtaatattcagcctgttcttccagtacagacaggaaatcatctttggcttcctgctccgtaagaccgaaaccatacgcgccgttcacgtcttccgaataaatagaaatacctccatcattcgccttttcgataatcgccttaatcttcttcataatcgtgtcatttttaatttcgtcaattaaagcacccaccgaagtgggtgcagtccttttacttctttaaccccgcctttttcatcatactatcaagagtaccgtttggaatctcttttgccggatgcctaccgacagggataaagtagtcaaagtcgggatgaacatatttgtaatggttcgtcccctttttgattgtccagcctgctgattcaatcaatttgtaaaactctgaatacttcataaaatcaaagaactttttaattgacgccacaaatataacgtttttgttacaaccacaaaagtaaccacaaagaaaacagtaacatatttgttacttttaacaattaacgaagccggcctacttctccggctttatcctttccatcatctccccatatatccaatccacatcttgccggaaatacttgtacagctggtaagagaaaaccaagttattacggttattggatatggttgtctgggcatttacacctaaaacctccgccagcttatctcgaaggccatttttcatctttcctccggcaagggtactcggagaatacaaaaacaagatgataaaaatgaatttctttcgttgggtaacattccctgacctaaatatctccttttgagaaataatctcttggaaccaccgatataacattcctatcatatcaaggtccgtcaatataggttctgtcagctctttttccctttccgataactttgatttctgctctctaattgattttatttccgcaatttctgaaaacatggcacaattatttagaagtaaatagtatttttgtactaaataatcgtgtggggaggtaacgttactggtggttcggggcgttgcctcttgtattttttagaatggaagatcttctcttgattgttcaggttgatagagtttcgattgtagactggcttcttgctgggcaagtctacttcccaataactccagcttatcaacaaatatttctgtcacataccgctttgatcccgttctatcctcatactgccgggtcttgatcttgccctcgatatagatttgagaacccttcctgacatacttttctacgacctcggccagacctttccaaaagataagactatgccattccgtgcggtctggaacctggatcccgttttgaagggtatagcccttctccgtggtagcaagcgatagattggcgacctttgtcccggcaacatctttcacttcaggatccttgccggtataaccgagaaggattactttatttatgctcattcttcattctttttttgttttgcaaattctataacatattcaacgccggcatgaaatcctttcttatagccatctttgtattggttatttgagattccatagtagtacgctgatccgatacacagggtaagccctatggcggtcaatacaattcctaatccgaaatatggataagtaatgtctatacgaaatggtttgagctgaatagatattccagatgtcatgacaaatagcatcaaaagcgatattatcgcccatattaaagccttaatcatttcgtgcctcctttcagtagttctgggttgtcgtatatgttaccaacgacttcataatcaaaattatcaataataccattatctatatctttttgcttaggcatccgagttataaactcctccccaaagcgtatttctggacacatttttataactcccgtttgagattcaacccatctttttgtctcatgttgttcctttatgtgaggcatatattgttcaggatagaaatcactttttataatttttcttttaacaatatccccctcatatacttcttgtccatttttgtcatacaagcccgtgaactggccaacggtttgtttatcaacgcaccaatcatccatcttagatgaattttcttttcgttgagaaagtatgttgtattccccatcaggataaacaataagagacccataaacccattcggttgatttagttatacgccctctgaatttgattttccggttcataattatgctaattgtttgattttacgattgtatatttcttcacatagtgcttcgcaccacttcctggcaatagtcacttcaactgcgttgccgatgaatttcttttggtctgcctgtgtgccaataagttcgtagtctttcgggaaacccattatcagcttcagttcatcaatcttcagcatacgcatagtgatgtctatgatgttgtaaagtgccataaattctttgattttgacagtcataggactgtctgtttcatagacttcaatagcgacttcgccggtttcagtcgtgacaagatatggcggcattttatccattcttgcgatgagcgtgaaacacggtttatcgacagaaccgccatttgacgcaaattgtgggttcatcaagtagtgctgcttcacggtgacaagtttctgcttcgggttcgtcagcacagccgggttgggctgttcgatgcttgaaagctgaccaccgcccgaatactcatttgcgatgaaactgcaagatgcaacaccaatttgacctaccgtgcatatcgtttgtgctgggtcttcaatagaatgacctgtattattgaagcgatagtttacaataaattgcgctttcacaaatgcgtggtggtcaatagtcgttattgttcctgccggttcttcgacagacacgttcttgctgtcaggctgaccgctgaattgctttgacagaaaagacactgatgcaagtgcaagacgctgttgtgtcgcgatagtggggcagggttcatcaagtgacggcggcacatactttccgcgttggttcatcgaattgtatttcaccataaaggcatctttgccacctgcgacaaacttaatcagtccggcatatatgcgttcaagcgttttttctgcaagcggtttctttcggttgaagattgatttgccttcatcttcaaagtcaagaacttcacgcactggcttccacttcggcattgtgccgaacaaacttgctgcacctgtcttgcaatgtgtctgtttcgggaacacaaccggcagaccattcttcgcaaagatgccgaagaagcgtttgcgcgatgtgtatgcgccgaagtctgctgcgttcagtatgcgatgcgtgaagttgtagccgtatttcttcacgttgttcacccacttgatatatgacttgccacggtcttttgacaccggctttccgttttcatcaagttcaccccacgacataaattcttcgacattctcgatttgaatataatcggggtctattgcttcgatgtatctgaaaagatgttctgcaagtgtccggctgtctgcgtcacgtggctgaccgccttttgcacggctgaagttcgtacattcaagcgatgcccatagcacaacaagtgcgtcagggttcttcgtgcgacacttctgaagatgatgcacaagtggtgacagttcaagcgttctgatgtcttctgtgaagtgaagcgcgtccggatgatttgcagcgtgtgacgcaatggcattcgcatcgtgattgacacacgcaatgacttctgcgcactgttcgccatgaagacgcgctgtgttcacgccggtagaagttccaccggcaccgcaaaaaaggtctatgtataataactttttcatttcactatcttgttaggcattcattaaacgccttttcaaacacatccggacttaacattttattggcaatagcttgaaatgccgtagatatagcaggtatatcgttcaaattaatgcttacatcctttggggttagattatccgttatcattcttgcgtaaaacatggctttgtcaatagacagccaagccaaaggattcacagctattgggaccaattttcgcattgatatgtaaaaatcacgtattgtaatcttggatgtttggcataacatatcaatagtagaagcgattgatattagatggttcagttctcctgaacatccattatttaaaagcgtctgacttatggcaaacccgtatttgtcgatatgaggtttaatatcgtcttccatgctttgcgttataaccgcaagcgtttcaacattgacattcgcaatcctgcaaatgtttgtattgtacgattccatgaatcttttcaattcgtttatgttcttctttactccacgcctgtagtatggagtattacggcaactatcgtaaatattaagtgcgtaattataaacttgatcatttacgaagaggacaatgtaagtcaatgaagtaacaagtccgtctgtgtctttgtctatttcttcccaattattgtattgtttcataatcatatagccattaaatcaaacaatgtaggagcacttacttcgttctccgcttcccgcagataagaaagcccgtctttccaataatcataattgagttctgttgaaagtcccctacgacctaacttgatagcacaataagggacagtaccgatacctccgaacgggtcaaataccaattctcctttgttcgagtaccgttcaatcagcctttcaacgatatctaactgaagaggacaaatatgattttgtcgtttcttttgtgattgctttgtgttaagcgttctcatacgggccacatcatcccatatccaatccttcttgcttacagggtcgacagccataaatgtttttggaagttttccgtatgcttctaactcttccgcaaaagacacatgttcctcatagttatagatatgttcacgttcgtagttacggaacaaatgccgaatcttatctattccagcacctttcatatcttcgtatgacaacaatgaattgccggaagacttccaacttgcatgggcatcgatctgccaacgggccagcgagtattcgctcttgtccttcttaacaggccggtcggcataagcacgtgaggtatcggtaggcaacttgcgaaatagcaatacatattcagggcatccaactcccatcttggaaccatccttgcacatctcggtatagcccaaacggtaggtctggttgttttccctcaccacatcagtatcgaccgtaatgcgtcccatatatcggaagccatgcttcatgtaatgaaatacagtcatttcgctgaacgggtcaatagttggcataccgtcccccgtggcgttgccgaacaaaacacgatctttcacatggatgcaggccaaccgacccggtttcaaaatgcgcattaactctggtgtaagataatccatctgttcaaagaacttatcgttatcttcattgtgcccaaagtcattgtatgtaggcgtgtattcgtaatgatttgagaacgggatactggttacgatcagatctacagagttactttccatcttctgacattccaatacattatcgttattgattgctttccacaacttgccggatttttcttcccgactggcgaacatccagcgcatcatcttttcctcggcctgcaaaccgaacaaaccgttatgccggacaatttcagtcatatttgcgaccatttcccggtgttgtgcccatttctgcatgaagctcttaaatatttcaccctcgctttcggcatagaccagatagagatcaacgggatgctgctgcataaagcggtatatacgggctatcgcttggaacttatcgttgaagcggtagtcaatgaacatgattgctttatgacaatgatactggaagttcagaccttcaccaagcatctccggtttagctgcaaggtatttcagccggccatctttgaagtcggatattaccttgtcggcttcttcatcgtcttgtgaaccatagacagccttacaacctggaatcgctttgcatagttccagccgttcagcttccaagtcatgccataaaaggaaatggtcgtccttgttttccgggcgattgattatctctaccacacgggcaatcttttcctgcatgttatctcggcgttcttttgccgcgtcagcaagtccgagagcagcctcacgaaatattttcacctgtccgtcacgatcagctccagccgtagaattgtccacattcacaatctcttcatgtacgcggagttcaggcaactcatagccagtatccggataaccgaggtcggaaggcttggttaggaacaacgcccatgtagatacccacaaccaaaactctttttccttatgcggataaagtgtcaagttattcgccttcgtgctgtctcgctgaaagaatcgagtaagagcctgtccggtgtccatcacaccaagataaccagcataatgtataagttccttgtatctgtttggcgaaggtgtagccgtagcaacaaacctgtaagggacacccgagaacaacggtagaaactcctgataggtcttggtgccgaatccgcgcaacacgctggcttcatccaatgatgttgcagtaaaataggacggatctattctcactccatcctcaccatcacgcacacgttcgtagtttgttaccatgatgtcggtaggacatatcatcacatctgccatagttcggacataagttactttcatgtgcaagtgttgttccgcttgtgttaggaactcgactaccacacgcttagggcaaacgatcaatcccttgcctcctttatggttcaagattacccgtagtatttccagttgggtgactgtcttttgcataccgaagctggagaatatagcacggcatccaccggcaaccgcccaacgaacagtatcttttacatgaggatataatgtcggggtaatttcttccgaattaatttcaaatcctgtttgatggctgatagccatcttatttcttagaaattctatatattccatgataattttaattatttcaattttgtatccacctcctcaaacaccacactctcactatccggcctatatttggcaaaacaagccgtcatatacttgcaactattcgcaccacccttgctacggaaaacgcatccgcgacaaattaccattttaccctttacgatagcttggaaacgctttattatcagtgtccgatctgcgaagtttacaatggtgccaataggtgctattcttaacttttctactgttttcattttcttagcttgattattctgattccataatctttttcagaaactccaaatgatccggaaatggtacggagttcttgtcttgcttctcgtatcttttttctcgttgtctttcctgttcttcccggtcgtatttctccagttgcctttttctgtatgctttgaactcaattagaacagacatgatcaccataggatccacaacaccgtaaaaggtgccatattcgccagctttcaacttgaagaaaaaaagcaacaattcggaagctttcaggtaatagtattccacacgtatcatcacggaaagctccaaaacctgttggaatgtaggcttctcttttacaccggcaaacttgtacaagtccatcagttgagcaattatccaagtattcacctgttcatctggataggtttctccgagcaaagccaatgaaggcgcattccccttgaacgaacgttccacattttgagcacatacaacctgtaatgaaggattgaactttttagcgaaactttcaccgtccccgtatctatttactactaaccgtgtcctttccgaaagcttttgcggcatattcgaggatttcacggtctgtttgttcctctcgtgattttgccccgtttggaattgccggatagtttctgctattcttgttgtcataattacctgatattactttctcaaaattcgttggtttgataagccaatcgaaagatgctgtccagccttttttgttctgccctttcaagaaatcgctttggtatgccctatgaatcatgtcggcaaacgtctttttgccataagattttatacgtgcgttaatcatccctttacggctatcagaaagcggagtcctgaccgtaccaaatacaccttttgtttcttcattgaagaatttgacaagttcggagtaatcgatatgttcggcgtggggctgcgaagtcccacatacaagagattcgtcagaatctcctatattattttctttcttatctttattaactttgtttccttgctgtttccgaggtgtttccttagtgtttccttgctgtttcttttccgtttcctcttgtatgatttgcgaattgtatttatcgtaattacagatagttataacggtttgtcctgtttcctttggtgtttcctttattatcattttgtcctgtatcagtagatccaagaatgaatttaccttctttgtagaccactgccaacgaccagctaaaaaccgcaatgaagcaagaatctggcccctcttaacctctataaacctattgccgataagttgtttcgtgtcttcaaatcgtgcgctctgaatcaaatcaagccatgcttcaaacctcgaatatatgcgctcttcgcaccacaattggtgctcaaatagtcgcctgctaataggtatgtaatattccataatcaaatcgcataatcacaatttcgtttgctatccgcaacaaaacgtttgttgaaaaaattgcaataaaccactttgggattgcctttcattaccggaaccggtgtcccgtgacaacatttcgaacaggtgtccggtctgataaccggacggtcacttttccttgccatatcctaaaatcttacatttgtcaattgtcgtcctttcgagaataccgcccacttgccatttccagtatctttcaaatgcaaatcggaaacttcaccgaaacggttgatgttaccgcataaatccacaaaccacgccgtctttcctttgtatggacggatgcaacggcctacaatctggtaatacatcgcaagcgacatggtaggtctggccataacaactgtgtcaagttctgggtaatcaaagccggtagtaagtacaccaacattggctactacaggtatttccccgaccttgaacatttcgagtattctttcacgttccttctttggagtatcaccggaaacaatgacacatccgggtatggacatcgtcaatcgttccgcttctttcaaaaaccgggtaaataccaaaatacccttcctcttgcctcctgctttcggattcatcagcctttggacgatatgaacgatgtaactataaaagtctatccgttcatattccttttggactgacttatcggtatagtcggctccggtagtgtttatcttcaaattgagttcgttccatccggtaggattcatcggatagtagttcacctttgagagatagcccatatcaagcaaggtcgatacctgtacatgataaatgacctctgaaaacacatggggctttgtccgggttatgaattttagcatagagccgaagtcacggctggaactcaaacgatatggcgttgccgttaatccaagaaccttgcacttcacagcatcgaagaaatccttgtacattccctctatcggattcacaaggtgacactcgtccacgataatattcttgaagtgggcaaaaagttccggatggcttttcacgctaccgatggttgcgaatgttatccggcttatctcttttgaattgaaggaggcggaataaatgctacaatcgagaatcccgtaagaacaaagtttcttgaagttctgttcaagaatttccttgctcggctggaataccaatgtatgaccgtcaagtcttgaagcgatgtcagctatgataaggctctttccactaccggtgggtaacaccataatggcgtttgttttcttcgtcttgttgttgaagaaggtgacggctgaatcagaagcttgttgttgataatcacgcaaaatataactcatacacctttctcctttcgtaacttcttgttcagtgttttgtaatacttgattaattgttcgtactcaaaatcagtcattttagtagtaccagcagctttcacttttagtaaagcgaatttctgttgtccgattttatcaatcagattcacccgatacccttctaaatggtcggctttgaatctattgcagtgtcggcattcggcatgacaattgttttcatcaaaacgggtcgccaaatgtgtacgactgaaatagtggccacaatcagcttgttcaaagggctttatttgcccgcaactgatacatcgaaaaaccccattaggcatacaatcacgaagccggatgaaaagggaaaactctttatcaagttttgccttcaaatccggcttcttctttactgttataccagctttgtcaaacagtggcaaaggcttgtctttcttctttgccttttttctttttatgtagtacggcatatcattcgtcttttagttcaactcccaagcataatactttatcagacacacctacatcatcaaattcaagttctgaataacttgtttcgtatggataaggatatatcttaccgtactttttatgcaactcgattatgtcttcatccgacaatttccgtctgatacgcatttctatctcgtaatcgtcagaaagattttcaatgacctttctaagctgacctactgtcttaattttgtctattctcataatctttgccaattaaaagccccggagcgtattctccggggcacaaccattatttaaaacccgtgccatttatgtgtggctcacattcatgaggagcgtaggggaatcgaaccctccaaaccataattgggcagtgccagcaatcatgattaacttgccgattgaagcttcataaatcaacaagtccttacagtgcatattgtacacttatccacaataaggaaacgcagccagcgtctacgcccatgttcgcccgtcccatcttcacagaccggacaggcaggctaaacaacgttattccacgtaaaccattgaaaactctttaggaatgaatctacctaccgggataggtttggcagattcaatggctgtatggatttccctctttctgaacacatgtcccttttctttggcttgtttctcacattcctcctctttgtttttgaggtagtgggtaataagcatcatcgctcggtcaacgttgaaggtgttcacgacaaaagtctgaaccctttcgtcttcattctccccatccgtgaatgtgattttcgtctcaatctggtagaacttcttttcatccggcttggcttcttcgtcactatcttccgtctcatcgtccatcttgtcagcgtattctgccatagtgatttcatttttgagataggcagtcgaagcgtcatcaaccttgcgctctttcaaattgtcggtaagaatcacgcaggaatcgaattcctttgccatcgttaaggtgaatcccgattgataattaagctcgatgtagtctttcaatatggtgcaagcattctccaaccctgttgcgtaaagcaggaacttgcttttcttacctcctatttccgcttgggcaatatgcggatataacacattattttcattctcgaacgccaaacggttctgattgctgacttccacttccctgataccgtcagcttccatgctgaaacgaattttcgccaaaatgtcttggtctatcagcgtaccacggtcgaaaagaatttcattccgttcaatcgttactgtttcaccggtatcttcatcaatgaaagattcctcccatgttttgaggacacgttttgcaagatacatgttgagcatcttctttgggtcagatgtcacataccggatttctgtttttcttgtttctatcataactaaataaattcttgatttctttgtatttcctgctgggcgtatatcagcatttgatgttcatttgcagccggcagatagatacctgccactgatgcactccaattacggaaacggtcaatactcagggtcatttcacctgttgtcagttcggcagaactgcgtaaataggttacttcattgcctttcttgttgaccgtcttacgttcaaacaaatcacggttgcaagtcctcttataaaaatcaatttttgcttcatcgaggctgcaaccgtattcactaccgaaataccctaaaagaagatgcaagtagctgttttgggcaagcgtgcggttaggaagcttcttttttacttccacaacggcccgctccttgaacagtttatttacatactccttaaacttgggtatttggtattcatttttcaagtcgtatatcatccatttccaaagattttagtatcggttataagtgctctgttttcttccaagaaccggataaactcctcacaatgattagtaagaataggaatatcacgttcaggattgaaaacgtatgtttctgtataggtatctaccacatagccgcctttgttgaactctacaatgttatactcaaatgtccgtacatcagaaccgttcttcattaaagcgtatggatatactaaatgctggtggtgatctttgaactttcccacggtataactaccggttgttttgatgtcgtgaacactggtaggcatcagttcgtcaatcagaccgtaaaccaatacattgccgtatgcagtcggaaggattgcctctacacgttgctgcgtcaacgcccctttgtagtaatttgcgaactcacgacaaagggatataggaaagacaaatgaacgattgttataaacggctttcaaggctataaccttttgctcgccattccctatatcagaatatatcttttctacctgcaccgtttcagatttccggttctcaatcatacagtcaatgacctcattaaaagccgtacccttgtcggcagcttcgctgtcaaacggtttacggttaatacggtctatcagttcttgaaactgcttctgccgaaactcttcttccgtacatggtggattctcactccacccataataacgctcatatatgacatcgctattaaggtaattgaagtaagaatccaataatgttgcatatatcttatacttaggctgcatctgaataagttttagtctctttgttaaaaatcagtcctaattctttcgccttagctgccaacatcattgaggctttcatctttgaacttcccacatggttgaaatcatcaatatgggcgataaagtcattcgctgaagctgcgtcggcaactaattctaaacaacctgttatatcagatagcactttgttatatgcttcttgttcagccttttttgattgcaacatagtaagatatggagcaataatccgagtagagataaaatcattcttggtcgtcggattgccgtttttgtcaaggatggtaggtacttccatcactgaaggcaagttacaagtattctttccgtcattccttgatgtcggatcgaaagtaatagtacgtctctgcactcctctctcactcttcatttccaagtaacctaacaaatcaagttcggtgacgatggagttgtaggacttctcacgtaaggcaggaataaacaccgtatcatcaccctcttttcttgtgtcacgatgggcaacaaaaatgatatgtttcttcagacttgatagcgttcttgtcatccaagaaaattcagcattgataccgccccaatctcgaatagatggctgcctggttccacatttataagtgatgataaaatccatcatcttaccaatggtatcaaccacaatagtctgataaacagacaaatcttcttgcaaaaccagctgaacatcattccaagaagtgacctgtacagtgtcaatattctccaaatgagccatattcatacgcttaacaccattgtcaaaatccaacaacagaggctttggtgcactcaaagctactgtgctcttacccatacctgcttgaccgtaaatcatcatctttacgtttgttggaatattcaattccgttgattttctgattaaactcatgattgttatatttttagttagtaattatattagagacttcaataaaggatctataccatccttcaattctttaagtttcttcagcgaataaactttaggactattcctatgtacaccagcccttttccaagtcaatgctcccgtagcgcactgatgagccaaccaccttctaccaaatccaagtcgtatagcttgcgtttccgtaatctcatcaatgaccggatccttggagatcgcatattcgctaaccgcttccttcgcagctgcttttattatattctgtaattgccaaacatcaatttccataaagaaatggtatatctcgccctctcgctcttacacggacacgggcgataagttctacattcgtgttagaacggattcggactctttgccgtttcatgtctaaatgactatcaacacaaagaataatcaaaagtacacaagcaacaaatgatctcatggccggcgaaaagtccagcgtcaaccggatacctgatatcctctcggctaactttaatgccaacttcctcccattccgaacacccaaaattaaaaatgctgtctgaagctggttatttatcgtacttactgcacgatgcttcaatacggcaatctcctttttttcatacccggctgcgtacatttgtgctgtaatgtcacattcgggcgttaactcggtaaatactttcataatcgtgtgtatttaaagtttgaatcaggaatctctaaatactgtaactatccctttcggaacattagtttccgatctccacttatgtccatttttgtacccttgtgcattaagcaatgaaacattgttgcgcactgtgcagactttatcgataggaaattctactttcttccctttctttaagtctctcatacgaggcataatttccacttttttctccataaactgattatatttaattgaatgtggacggaaccggtaacgatccggcatacacacttccggctgtgtgcagagcattccatacgcccgcccgtttgccggggttttcacccggctgcttttgctaatctaaacacaaaacgaattaaacaacttcaagaaaagccttaatagccaacattttcttttcagctaacactttggctgcttcttctcgatttttccaatctttataaagttcgaggtccttttttgtactttcgaggtctttattaagagacgacaccaattcaatcagttcctctcttgtcatttcttcaataccttttgtttccatatacattattattaatagttaccaacttttttctttataaatggcgatcgttagaataaccgacatcacgaatgttaatacgtgaaacggattaaagaacatgccaacaaaacaggtagccgacatcagtactgcgcagatgaataaaattagctgcactcttgaataaaaaattaccttcatgactgtttgatttgatttgtgccctccggctgattcgatcagtagcttcgcgcctcttcagagggttttcttaactttgtggtgcaaactttaaaaattaagaagtatgaaatcagaaaagtacctgagcatggctaaagacattcgttctaaagtcgaagatttacttgacgagtataacacctttgaaccatcaataagcaagatgtttcttgatggacaaccgttatatgaacaagctataaaatttacccacttggtttattcatttgatccaaatctgcctttaaatagagagttggtagatctgccaaataaatgcaaagggtgtataattaaaacgtttccgcaagaaaacgatgtctttaaaaatttcttgttccttttgaaatgcttcactgattatctggagacttttcatgactaactttctctccgcgtaaaaggtccaagtaagaagtaaccgctttctcggcatcttcttttatgtactccaaatttttcagacaattgattggcaaatcttcaacatgtatggatattgtcaattgattgtctttttcttgatgttttagttcaatgttgtaattcatgtgctatgatattttaattatcttttcttcttgcttattatttcaaacctcacaacgccaagttctgtatatgcgccgtattcaatccaatatgtcccacgagccgcgtttattttaggatcatatttactatcaaataatagcgtctttgtgctaccatcaatataatgcgcacttactttatattcataaataggcattttggagtacctataaaggcctatagcaaaaactataaggcctgatatagcgacagctattaaaaagtttcttataataagataaggtttgtaaccatcggcatattgatgaaaaaaaagtgctccaaaagcaccacctgcgaatataaatacacctaaaacttccatatcatttattttatttgtacccggcagcccatccgataggcagcgtcgcgctttcagaaccaggttgtattttgaaaagaggcaacggttaaccaatgtctgacacataacaccgcaaggaacttgcccctttgacaattcttttatctataatgtatccctgtgggtcatggctcaaagctcaccacgtttatacattatactttgtaatcctttcgcttaaactccatttctgcgagtgctaaggttgaaataagacaaagaacttactgtgggcatccgggaatcgaacccggtcagaaacgcctttcttcaccagccgaacactttcggctcatgccctttgctttagtaaatcgttatgaagttttctactttgaacgatctgaatccgttcgcctcaatatcgaaatagcgaaccgtcttgtagttttcagaaccagtacctttgataagattctgaatgtctttaagcgtacctttggctttgcgaagtgaaccatcagacttttcataggcgaatgatacgatacctttgtgcatttgttttgtcaaacggtacaatgcccatgcgcgtgaaagacataccgcgaacgctttacctgttgctttcataagttcgtaagccatgcaaaatactttgtgtctaaaatttgaagttttcataatcgtgtgtatattaaagtagtccaaagactaccggttaaaacttgatacaatgtggtgaaactttgctttatccacccctctaaatgaggcttcattaagaatgtgatcagcgacattatcattaaccttgattgcctttagcgtattaatatcaatatgataaggttcgtcggttggctttgcgagaggcacgtagcctgtaaacggaaaatttcgtctgccgattggccaaactatataaccatgaggatattcatctacaatctcgaaaatatctttacgattgtaattctcagtaactaatatattcataatcgtgtgtgtttatgtgttagtataaatagttgttcattgcttcgtagccaccaaatatttcggcaacaggatcgttagaccaatccagtggggtgagatattcaacctctctttcaagaacttctatttcattagagagaatcttcacgatctcagacttgctatctacattgtatatatagcagacttcttcttcgccaatcgtgttcaacgcttctaactcgccttttttgttttcgagttctgctaatgctgtttcataagatcgtgccataatcgtgtattttaatgtattcgtattattgctttactcaacacgatcgcttacctttgctttcgtgattgattgatgatgcaaagatatgaacttaattcatataatcaacgctatatatgaactattttcatatataaatagttaatttatgttttatggctataaatcaagaatttaaaaacttaattagcaggattaaatatgaatattcactcaatcaatcccaaatagctgatagtttaggggttaaaaagacatatttatctgatatgataaatggtcgtgtaccatataacgaaaccatgagcaaaaaaatcagtgagattttcccggttgtcaacaatgaacaaagttcatataacaaaaccataaaaataaccgaatctgacataaacgaaagttcttttagtgggactttagtatatgatatagatgcgacttgcgggatggataatagagaaatagaatttgcagaagatagaattatcggttcagttaatttgccagaaataagtaaaactgccaaaatagtaacggctaatggtgatagcatggaaccagtaatatataatgggaatagagttgttattcgagaaatatttaactgggaagacatcttctacgggcaaatctatttaatacttttagacgaatataggatgattaaatatatccgcagatatgaacaggatgaaaaaaactatattatcctacgtagcgaaaattccagatatgatgatataaaattacacaaaagtaaaataagaaaactctttattgtagaaaacatattatcagttaaaacccaaatatgattccatgaaattcaatcattcagtacataaacattatttaacctttccgtattcttgcgtacattatatagagtggttatgaagaaagagagttgggcgttattattaagttctgtagctgtacttattagtttagttgcaatatgtgtagcttgtccgcataaagcagaattgggatttgattaccaaggagtgatagtaggagtattatcattgttagtgacaattctaataggatggcagatatatacatttatagatataaataagaaaagcaaggaattagaagaagctaagaccgcggcactcataagcacggaaagaaataacgctttaacaaccaatgctatttctgatttttattattacattttacttaagtctgatcctttaggagttgagtatcgatttttagattacagaataagctcattataccacttttcgaatatcggagaaattgagacttgtaatacaatagttaaggtgcttttggagatgattgttgttccagaagatatcaaggttttagagagtgggaaaaatagaatacttatgttgctcacaaaagtaaaagatacagataaaattataggatatgaagaattagtttcgagaattgcacgattaggtattatgcctaagcaatcaaagtaatttatgtaagctttcaattatctcatcttggactttcttatactcttcgggagataacagttttaatcccgaatattgaagtagatggttcaaatgacatggaaaagaagcgttaacattgcgtctattccaaatatcacattgaatttgtacatctgatttatagcgttcaattgctaaattcagaatagactctttggtagcctgttgatacggaagtttattattgtcatccatagtgataaagcaaagacgacaaccccaaagttgcggtttgaggaagtcgcctatatagtcccttacgggaacagtttaacaatttagtcggtatcatccgcaacttgattccgacacaaagataataaaaatgatatatcattgatgttatgtataatttaaaaggcttaagaaaagaagttaataagacacaatctgaaattgctgttttatttggttgcaagcaaaacaatatttctatgcaagaaaaaagcgatagagatttaacgactgagcaaatggatgttctacgaaagaattttggagaagaaattgtaaataaatattattataaaatctccacttctaatgtagaaaccataaacaacgaaagagaatctactttaaaaagtagttcagattcttttcgtgaaaaaaaacgaatccctttttatgatgacgttgcaagcattggaggtgtcaacacaatggtcgcagataattcaggtcacatagctccttccgaattgatagacgccggcgactggttcccagaagcaaccgcagcaatccgtcattatggagatagcatgattgagtatccaagtggtagtatccttgcattaaaacgagtagaagataatagattgataatatggggacgcaattattctattgagactacagagtttaggataacaaaaagacttcaagatggaggagaagactacattctcgcgtacagtagcaatgaaagtacatattcagacggaagattgattcattctcctatccggattcctaaagaaaccataagacatatagacctggtattaggatgcgtaacaaaggagtacagcaatggtcctataaaaatcatcaaacaataaacaaactaattacaaacaaaatgaagaaaacactattttttctatttatttttatttctgcaaatgcacagaataaacgaactataaatcttgaaatagccggtactcttttctctaagattaatacagaaatcaataatatttcagacattacattaactggcaacattaacaatgaagatattattgtacttaggaatatggtgcaaaatggatctttagaatatgtagatatgttcgattcttatattcacggagaaggagatgaagacaatgtcataccggaagaagcctttaagaattgcactaatctaaaatctatcatactgccacaaaaaacattggcacttggatacgagtctttttacatgtgtacaaatctttctgatatcactttacctgaacaaataacgacattttcaggttcggtattttgggggtgtgaaaaactaaataaaatagatattccaaactctgtaacatggatagggccatactctttctatggatgtataggaattaataaattaactataaaaagcaaatgcgctatattaaaacattcatttgacaattgtaaaaacttacaagaaatcatattcccagaatcaatggattatatagaaagtgatgcttttagaggttgtcatatagataaaatatattgtacaggagttccattttcaatcaaagatgactcatttgatgaacgaaccaaaactgaatgcaaattatttgttcctaatggaatgtataacaaatatgcctgggaatcaaaatattggagtgaattcaaaaacattaaggaatataaccaaaacactgttgacaacgaatgtgtttcctttaataatgtgaatataagagttattagaagaaatattgttttagaaacagttcaaaatactcatgtttcaatctacaatataaacggcacattagtatttagttcatcagtgaaaaacaatgtatcaataccactccaatctggattttatattgtaaaatacaatgatgaaacaaaaaagatagcaatactctaaaataaatgattatgagaaacatcctattttcattaattctaatcattgctttttcatgcggagaaagcaagacagaggtaactggtgcagataaatacatcgaaaccatcacaggattcacctgcgaaaaggctgttgttaccgataacggctatttgattattgccattgacgctgaatcagcttccggatatgacgcacttgcttcgcaatttcttgaagaagctaaaaaagaaggtgtgtccggactaaaaggagtattgatcgtggatataaaaaacgcgaagtttgaacaaggagctgttgttggcaaaagaatagggaaagcttatgaataaccagaaacaatcacagctattcttaattcgtagcaataaaatcccggcatatttttttagtcatgccatgcgacagcgtatagaaaaaaactatctttgccaaacgagaaacgttatatctatgaataaacgactaactttttacaaatattttacagaagtcaattcataaatatataaatattagataataaacatattacagcatataaatgaaaagtaaaagtttagtttctatcgatcaatgctccaaagaggacattcttcgtattctggataacgccaggaagtttgaagcaaatccgaaccgtaaggtactggaaggcaaagttgcagcgaccttgttcttcgaaccctccacccgcacacgtctaagtttcgaaactgcagtgaaccggttgggcggccgtgtgatcggtttctctgacgcttccacgactagttcctccaaaggcgaaacactgaaagataccatcctgatggtaagcaactacgttgatcttatcattatgcgccaccatttggaaggcgccgcccgttatgcatcggaagtcacggacgtgcctatcatcaatgccggtgacggagcaaaccagcatccttcccagacaatgctggacctctattccattcaaaagacacaaggcaagctgaccgatctcaacatcacaatggtaggtgacctgaaatacggacgtaccgtacactcactgatagtaggtatgtctcatttcaacccgacattcaactttatcgcaccaaacgaactccgcatgccggacgaacagaaaaacttctgcgacaaacatggcatcaaatacaacgaatataccgaatttacggaagacatcatcaaccagacggatattctgtacatgacccgtgtacaacgcgaacgtttcaccgacctcgaagaatacgaacgtgtaaaaaatgtgtatatactgaagaatgagatgttgaaaaacagtcgtgagaacctgcgtatcctgcatccgctgcctcgcgttaacgaaatcgcttatgatgtggacgataatccgaaagcctattatatccagcaggcacgcaacggactgttcgcccgtcaagccatcatctgcgaagtgttgggcatttccgttgaagattaaaaatcccgttttctgattttcaactttcaattatcaattttcaattatcaaaagttatgtcagcagaaaagaaaaaagaattacaggtcgccgctttagagaacggtactgccatcgatcatatcccccccagccagttgtttaaagtagccaaattactggggctggaaaacatggacaatacgattacgatcggcaacaatttccacagcaataaaatgggctgtaaaggcatgatcaaaatctccgacaagttcttctgtgacgaagagatcaaccgcatcgccctgatcgcccctaacgtgatcctgaacattatccgcgattacgaagtggtggagaaaaagaccgttaccttaccggacgaactggtagggctcgtaaaatgcaacaatccgaaatgtattaccaataatgaaccaatgccgacccgtttcgatgtaatcgacaaagaaaagggtacgatcagatgccattattgtgaacgtaagattaataaagaagacatcatcgttaaataattaacaatcgacaattatttgtcgcagtcttttaattgcccattgtcaattaccaattgtcatgaaacacgactggaagcccggcacgatgatctatccgctgccagcagtaatggttagttgcggctctgagccttcagaatacaatattatcacagtcgcgtgggtgggtacgatatgtaccaacccaccgatgtgttatatctccgtccgtccggaacgtcactcctacccgatcctgaaaaagaacatggaatttgtgattaacctgacaacccgctctttagcatacgcaacagactggtgtggtgtcaattccggcaaagatcatactaagttcgaagagatgaaactgacgcctggaaaagcctcggtcgtaaatgctccaatcatcgaagaatgcccgctctgcatcgaatgccgggtaaaagaagtaatggcattaggcagccatgacatgtttatcgccgatgtggtaaacgtgcaggccgacgacaaatatctggacccggaaacgggagctttcgatatgcagcgtgctgacctgctggcttattcacatggcaaatattacggattgggcgactttgtcggtaaattcggctggtcggtcagaaagaaaaaatagtcatgaagaaaatttaccttatattgctgatacttccattctgtttctcggccaacgcccagaagtttatcaagatcgaagataagacattcaactggggaggaaaagtcggagtcaatgccgcgctcccgattgtcaaatcgttgacgatagacaatcaggagatggaagacatacgtctgcaatataaggtaggttaccaagcagctgtgtttgcacgagtcaatatcgatcgtttctatattcaacccagcttggcatggcaatatacggaaggtgacatacgtttcaacataccacagacggaaaacagcctgcctgacgggacaaacacccaaatgcctatcggcaagaaccggattacttataagtccgccacgctcgaagttccggtgatgatcggttattatctggtaaaagaaggtccgtacgcattaagcatgatgttcggccccaatatcaaatacaactacaaaacgcgctacagtacagatatgacagacagaccccgcgagtttgaagacgacaatacccctttcggcatcagcatagccgccgggctgggagtcagtatctggcgtctgtttcttgacttcagttatgaattcggtttgaacgaggtagcttccgatttccgtgagataggtaccgaggccaaccagaaagggactctcaacattgaaaaacgaacaaacataatgagtttctcactcggtttcctgttctgattcagattttcattgttaaaccatcaaaaaacatatcagatgaaaaaagtcaagattacggtattaaaaactactttaaattcttatcaatttgatggattaatttgaaagacaaacgcttatggaagttctgaaaagtctaaggtaacgatttggagattgtgctaatttcagtactttacagtctcatacttatgaacaacttttataggacaaagatactattttttttgaataagagaataatttcacaggaaaaatagaaattttatggggaagtgttctgatagcatgtcgttgtagattgtagggaggggatgtaaaacggcaggcacatagaatttccgatattcagaaagccgtattcccaaaatagagattatttttgaaagaatcacataatccgctaagaataaaagtttatgcggatcatcaaaaaacgaggtaacgagttggcaaccgttctggtttctacatacttgcatcaattgcgttgatgtgcaactcactttatgtaaaggtacgattttttacggaacatgcaaaacacctttgatttttcttttttagcaaccgtcaaaaacaatctttcggtttcatatcccggtcacaaaggcggtacagtctctttatgaaaagtaaacaaaggtcaggcaggattgaaacagactgttacgagaacagtcagaaaaggattgcatacaggaattacagtctgataccgggcaggggacgactttgtgccaaagtccaaaaagaggttctttttccagacggcaaactccctcacctctaaaaaacagtctgtggctggcgcacgcaaacgtccagcctttatgcggacagtcttaatgcccgcagcctgtacaagtgcgtaaaaaacaggtaaatggaatcttcatccgcttccccgcgccttgccgacactcctatattcccgttccaacacctgctcgatctcgctcctcttgtacaagaccttgccaccaagtacatagtaaggcagcgtgccgttgctccgatactcgcccaatgtcctgcggctgactttcagcatacacgccacctcactgtcgcacaggtacacgtcttcttttggcggaaccgcgccatctccgaaaatgccgtcaatcatcgccgacagccggtcgatacgctcgtggatggactgcatccacgcatcgtctttcgttttcaattcattaaacattatatagattaatttgttatatgactcattttgtgactgattctgaagttgtgtaatccacaagcaataagaatcaccatatcttcgaaaccgaatttatggcatctgaatcgttctttgacaatacggcattttttcataccacctatggcatgctccactttaatcctaactccggaaatccgcttgttctcttgtttttcaacacaagtaagctctttccctttaggtttctttttgggcatgcatatttcaactccatccggtttgtgtccgatgaaacctgtatcctgccagagcctaatacctttgggaagtagaagaggttcttcatcacaaatctttttgtcatggacatgacctttgtatgtggagctcaaccatacaatccgaagattgttagtacataacaggttattctttatgctatgagttttttttaccactatagcatgcagactgccagtcttcatccaaaggacgctgaataggtcgctcggttccgtccaacaagacttcttcgcacccttgaagaatgtgtatcagacgtttggagttacggtcaggcaattcaccaagcgttttcaatgtacgccggagaatctcagaaagaaggtgaatccatctattggcctggggctgggtcatctcaaactgaatagcatggagttcctgaaggggattggtcttcagatataccaatatgaagaacattttgtcctgaatcagagacaacactgttgtaagatatacgttggcgcactttaccttccaaggtaaaatggctgtaatattcatcccaatggtacttgaaagttattagcaaagcgtcaaactcagcaggagttaatcctgtcgcagcaagcacttggctatgacggtggcgaatcttgtcgtaatacatcaattgaactttttagatcacaaagataaatcaaagaacgctttaatcaattattcgatataaactctattatacatactgctcatttgtcttttgttgatacttcagttcaattccttcaaatggtgtgccccctgtagcgtgcatccttgcgtctgtcctccactttcgtgacgatacgctccacgtcttccggcaggtaataggtacggttgcctatcttggtataggcgagcgtgccgttatcccgcaaggtctgcaaggtgcgcttgctgattttcagcttcaggcagacatcctggtggtcgagccagccagccgtcctcttcacgcctttcaaatccagatggggattccctccaccctatgtatgaaccgttcgattttcatggcaaattcctcgaacgccttcctttcaaaacatacggtttccataacaatccgattttatgttgatacttcaaattcataccatccggagaaacggtcactcgtggtgccggtataacagcgcatggaagaatttaatctgaaaactgaccgtgcagatgttattgttcccgccgctgagatatttctgataattgcaggtattgtcaaagctgagtatatccatgttccggtcattggcttagcagatggtattattgacaatttgtatgccatatacctgaaaacggaataaaaggaattgtgcatagctgttttaactaggggatattcagtaaatcctataaaattagccaactaattcatactaaaagtattgcgaattagttggctttttgtatctttaggtatttcccctaaaattttgaagaacgattgacaaatgcttcagcggagtcgttcaatgctaaaatcaaagctcttcgaagccagtttagaggggtggctgatctgaaattcttcatgttcagactggctaggctatacgcttaaaggaaagcttgccaaccggaaaaatccgctgcccctggaaaaagcagcatagccaaaagaaaatatagcagaactgtaaaatataaaagagtttgtgccaacgttttgacacaaacttagcagattactattcagctgatacctattctgaaagatgtaaacaacttgtttcttagatagccttataaatattctactacttattacagttcatttagaaatgttattctcacttttattcctccgctttttcacttgctccactgcttcagatatgattcccttgttttcaaaacgctgcgtgtaattggtgtaatccgggtgaatacgttcgtaagttgggtcagtgaataagggactcgtaataatgtggtccgcagtcgaacggttacagcagaaaacaatattttcaactccagccagtctggtcaatgctttcacatccgtatcatgcggctgtagtgtcatcggatctgtaaaaaagaacagatagtctatttctccttctacgatccgcgaaccaatttgctggtcacctcctaaaggaccagatttcaggattgtgatatcccatttgatttcaggatgtttttcttcaagggcttttttaattagtgtaccggttgtacccgtacaatagaatttatgtcctatcagacgttccgagttccagagaacccactctatcatgtcttttttcattgcatcgtgtgcaacaagtccaattctacgaacaattgtttccataaagctaaattattttatttttatatgataattataataacaaaaaaactaattctattgaaggccggaggatgaccggataaatctgagcaattctttgtttgcctggctatccatgacggtttcccgtttttcttcaaaaagattgagtgttgtggagcattccccacagatgtcaatgcctactacctgttctttctgaagaataacagccagcagtttctccaattcccataagctgagagaaccttgatcccagtttgttgctgccgaagccggattcaagacatccttgtctatggaaatgtaaaccggtccgttgatatgtccggaagaaaagttctgccaaccctcttcgtgcatgagcgtagtttcactgtaaaaccgaacttgtctttcatatcctttcggcacagcctgtatcagtttgtctgaagaacctacgataattactttcttgcagttgttgttatggtccaatatatcctttacccaacttccgcaagaaagtatgttgtcaaacaacggtggctgcatatcgggatggtggtcgaacacaatcagcgaaaacggagtttcaagtttgtctgtccagaatttagtcaaataatgataattgcctgaatcgatgaaatggactccctccgccggataatcagcaatcatccccttcaaagccaaagccccctccctgtcacagtagccatctgtaccataaagatgacgacaatccagccatataaatttattgttccgggcaaacgcctcgtagtcatacactcccgtgaagttcatgatgatgatcggccatgctatccgtttatctgttttttgattttgcccgctcatacgttgtttttgcatatccttttactgttcattaaaaccatcgtacataacagaaatcttgtcggtgaggtaacaaagcattcttgggatacatacggaaggcctgcttgaagcttccagcgttgaaaatgccggatgtcgccttaaaggtatataaattcccattcttggaaaccggcaaaaggggaataacctcatatatgtgatcctgaccgtcttcacgcctgataatgaccgattctattccgattgcgtcatccaggcctttctcatcaacgacaaccgtcacctcatattcctttccggcttcaaccgtggcattcagcccattccctgcctctatggatttgatttctatggcatcccatctgcttcggacgtttgctttccagtcagccatcattttcgccttcgcaaagttgtcggctgccagaatgtggaaatgctctgacagtttgttatagaacctgtcatagtagtcgtccaactgtcttttcatggtaaaatggggagcgatttgtgcgattgagttcttgatatacttgacccagtcttccgaatagttcttccccccatgctcgtaatacagtggcaggatgtcatgctccaacaaataatagatggcttcggcatccagctggttttggtactgttcattctgataagtccttttatcagtcagtgcccatccagcatccttacggtatccttcataccaccaaccgtccagcacggagaaattaagcacaccgttcatcaatgccttctcgcccgacgtacccgaagcttctgccaaccgcgtaggggtgttcatccaaatatccacccccgagataagatggcgtgccaggtccatgtcgtaattctccaagaatatgattttacctaaaaattccggacgccgggatatttccacgatttgcttgatcagcccctgcccggcaccgtcattgggatgggctttgcctgcaaagatgaactgtaccggatatttcggattattcacaatcctggcaagtcggtctatatccgtgaacagaagatgagccctcttatatgtagcaaaacggcgtccgaagcctattagaagagcatcgggattgaatctctcaaaaatggaaacgctcaatgccggatcaatctgactcctgagccagtccttgctgcatttgcttttgatatagtccagcaattttgctttctgttttaaccgggtattccatatctcttcatccgggatgccatagacggcctcccagattttctgattggactggtcgcagaaaaaattctcatcaaaattgtccttgaaaagctttttccattctgccgcacaccaggtaggcagatgtaccccgttggttacataacccacatggttctcttccgggaagtatcccttccagatcggcgcaaacatttgctgggataccgatttatgcaacttgctgacaccgtttacctcctggcaggtcttgcaggcgaagacagacatgcagaaacgttcctccttgtctcccggattgtgacgcccgagatccatcaggttatcccaggttatacccaacttgccaggatatcccttcatatatttattgaaaagcccttcgtcaaaataatcatgaccagcgggtacgggagtatgtacggtataaagtgaggaagcacgtaccagctccatggcctgcccgaaattcaagccgccatttatgtaatcacaaagccgctggatattgatcagtgcggcatgcccctcattacagtgatatacatctttcgttatacctaaagctctcagcgttatcatcccgcctatgccaagcagtatttcctgttttagccgattctcccagtcgcctccatacagatggtgagtgatagggcggtcaaactcgctgttgagttcattgtccgtatccagcagataaaggggaatacgccccacactggctttccagacattggcatgtaccacaaaactgtcggcataggggacgtggattaccagttgtttcccatccggttgcattaccttttcaatcgggagctgcccgaaattctgcgctttataattgactgtctgctggccgtccatggaaagcgactggtcaaaataaccgtaacggtacaaaagtcctatggcacaaaggtccacattgctgtccgacgcctctttcaggtaatcccccgccaacattcccaaaccgccggaatatatcttaaggacttcatccaagccgtattccatgctgaaataagctattgacgggcgctggtgatccggttccacatctacgtattttttgaaggcggaatagacggcatccattttatagacaaagttctcatcatgtgccagcgctacaagcttctcataatttatccgctccagaaacaataccggattctgttccacctctttccaaagttccgaatccaaatcacaatacagtttctttgcgtcatcattccatgtccaccagagattatgtgcgatttctgcaagttttcgcagttctgcaggaagatgtgaacctactgtaatctccctccactgaggggtatttacattataacttgaatattccatgacattttaattaaataagtcctaatctttattcagtccttttattatttttcgtttaccgacaatccataccgtatcattctccttgaaaattgtatcagggtctggattcataatattcacggtactcctctctattccgataatgatgctatccgatatgtctgcctcccggatcgtctttccgatcaatggtgaacctccttcgacaggaaattgccctatttccatctcatcctgcgaggatgttccgttcccgttcctttctaccatcttttgctccatggatgtccggaagctttccaactgtcggtccgtacctacgaccgtaaccttgtcatatggatagagatgttcttccccttgtggtatatctaggcgtttttctccacgggtgattgaaatcacatttatctgaaacaaggtgcgcaagctgctttcttttaatgttctgcccacatatatggaatcaggggatactgtgaaatccgccaaatgtaattccttgaacgggatattgctgccaagggtggagcctgtatcactttctgtagaaagtccattcccgtccgtcccctgaaagtttgccataaattgtctctctatagtcagcgaccgtttcttgatccgcttggaaaaataaatgacggcaatgataatggaagagactaccaacccggctcccaaggcaacattgaaaagatgggtaatgatactcatcatgataatcgtgcagatcagtattttgacaagtactattgataccaaaggccctctgttgaacttgttgtccgtccagagtttacggaactcggttgaattgttccttttcatgatgatggcccatagaaacggggatatgacaagaaagatgatgatgaagcccaacaagttcccttccattcccggcagacttttcctaatcaaaggatgcacataggaaaaatataaagtgatgaaaaaaacgcatacgaccagatagagtgtgacagacaccagcatagaccggatcagtttatgccaagtaccctggtgttttacagtcattgccccggacgtatagtgtacgagataatctttcagggattcaggcatgtggatgtctataaaccggtatgctggttccgaaagccgtatcatatagggggtaagaaaagtcgttatgacagatactgccactatgaccggatagagatacttgtccgtaacattcagactgacgcctaaagatgcgatgatgaatgcgaattcaccgacctgtgtcagtgaaaagccggactgtatggcaattttcaacggctggccggaaagcaagacaccaaagctcccgaacagtacctgaccggacagtaccagcaatgtcaggatgagaatagggacggcatattcccacatcatggcaggatcgatcatcattcctaccgacacgaaaaatatggaagcgaacaggtcttttaccggctgtacgatatgtacgattttttccgcttcaacggtctctgccagcagggaccccatgacaaaggctcccaatgcggcagaaaatcccgcttttgtcgcaatcatcaccattcccaggcaaagtcccagagaggttatcaataaaatctcgttgctggtgaaacggcgtatcttcttcagcagggtaggtatcagatagatacccaatgccgaccagaaaatcaggaaagcggccagcttcaatatactttccagcatctccttcccttcaaaatgtttgcctaccgccaacgtggaaagaacaaccatcatcactacagccaccagatcttcgataacaagaatccccaagacaatgccagtgaatttctgttggagaagtcccatgtcattgaaggccttgaatacgatggccgtggacgacatggacaacattccacccagaaaaatactgctcatgtgggagaaccccattgcattccccgctgtataacctatgaacatcatgccacatacaatagtgacagtggcaacgatagccgtaatgcccacatttatcaatttcttgaacgaaaagtccagtcccatcgcgaacagcagaaaaatgacaccgatgtccgcccatattttgatattggcaggatcggaaacagtcgggaccagagaaacggaaggacccgccataataccggctacaatgtagcccaatatgaccggttgcttcagccacttgaaaatgacggttacaataccggcaataatcagaattatggcaagatccgatattaaaggagcaacttctgacatattaacggttattttagatcgataattcgttaaggacccggatcaggcttttgtcaataggcttgtcctttttgattgcctggacaaaaggaacataaacaatctcgttgttccgtatgcctatcataacatttcgctggccttccattaaggcctggattgcggcttcacccagccggcttgccagtatacggtcattggcactcggagcaccaccccgttgcagatggcccaggatagaaaccctgacatcatacccgggatattccttctttacccggtcggcgtaatatatggcacctccattcttgttttcaggactttcggtcacaattacgatgctgctgtttttcgtctttctgaatccgcgcccgatgaatgtttccaactggtccacgtccgtcctgtcctccgggatgatggccgcttcagcaccggaagctattgcgctgttttgtgccaggaagcccgcatcacgccccatcacttcgacaaagaagatacggtcatgggaggttgccgtgtccctgattttatccacgcattccacaatggtgttcaatgccgtatcatatcctatggtaaaatcggtaccatataggtcattgtcaatggtgccgggcaatcctatgcacgtcacatcatactcctccgcaaagatacgggctcccgtcagggaaccgtctccaccgataattatcaaagcattgatgttctctttctgtatgaccttataagctttcttgcgtccttcgggagtggtgaaagtctcggagcgagctgttttcagtatggtgcctcccctctggataatgctacttacatcttccgtcgtgagttctttcacttcaccggcaatcagcccctcgtaacctctataaattcctttcactttaaatccgttaaaaatggcggcgcgggtcacggcacggatagccgcgttcattcctgaagcatcccctccggaagtcagaattccaatatacttgttatccataatttgttttttatattttaattaatcaggcaaaattagaaagcaactgttttagcctttttctgctataaaagatacggctttttatcgtactcagtgacactcctatctttgcggctatttcccgatatttgactccggtacaacataaaaacgacataatgtgctttaggcaatgttttaagggcttcccttatctcttttgcatcatgcccgttatccacgaaaatgaaagagtcgtcccttaacaggaaatgatattcaggttctgataatacatataaattccctcgtattttctttgtccggcaattattgataaatgcattgcgcatgatggtatacatccagcctttaaaattcgtaccggaatcaaacttatccttattatccaacgtcctcaacattgtttcctgcaacaagttttctgcttcatccttgtcagcagtcagtttatatgcaaaacaatgcagttcattctgaagggctaccagcgctttatcgaaatcaaatcctctcattatatttattttggaattcaaatatccgggtgaaggcattccctgataataagaaatgccttctgtagagtctcatcaagatatcttatttgacatcaatagttttggtggtttcctgaaccttcttatctacgactttgggaatatcgataaacaggaccccgtgttccactttggccgaaattttatctttttccacattatccggcagcaggatactctgctggaatcgggaataggagaattcacggcgcaagtattttccgtctttcttctcctcctttttctcgtcctttttttccatgcagattaccagattgttgctttcatccacacttaccttaaaatcattcttggtcattcccggagctgccagttctaccttgtagtccttttcattctcaatcacattgatggctggagccgtagcgtttgctcttgccatccattcattgtcaaagaaatcgttaaaaatactcggtaaccaattctggtttgtttttacaggtaccatttttacctcctctttaaaagttaataattaaaacttaaaaaaaagcatctgcttgatagacagatttttattttttagccatcccttgtttggccacagcttctgcccgtttccgtatctcttccgggtttccaaggtagtagtccttgacaagaaccagcctgtcgtcaaattcaaagacataaggaactgccgtaggcaggttcaggttggaaatatccgtatcggaaattcctttgagatgcttgatgattccgcgcaggctgttaccatgggcgactaccagcaggctgtccttatacatcaatgcgggaaagatgatgcatttccagtaaggcatgacacgcccaatagtatctttcagggattccgtacggggaagttcgctatctggtacaccggcatagcggatatccatgcccggattacggggatcatctttgcctaccggagcgggagccacgtcatagcttcttcgccagatgtgtacttgttcttcaccatattggaccgctgtttcactcttattcagtccctgaagcatgccgtaatgcttctcgttcagccgccaggtcttttcaaccggaatccagtctttatccagccggtccaagacacagttcaacgtttttacggcacgtttcaagtaagaagtgtaagctgcctcaaaagaaaatccagcctcccgtaatgcatcgcctgccttgcaggcttcttcaactcctttctcgcttaaatccacgtccgtccatccagtaaaacggttttctttgttccatagactttcgccatgacgtaataacactattcttttcatggatacttcttctttatgcaatggttattgaagaatccagatatacgtcctgaatggtgttcagaagttgaattccgtctttcatcggtttctggaaagccttacgaccgctgatcagccccataccacctgcacgcttatttactactgccgttacgacagcatcatgcaggtcggattccccatgggattcaccgcccgagttaatcaatccgacacgtcccatatagccattcgccacctgataacggcaaaggtctatcggatggtcagtggtcagttccgaatacatacactcgtttgtctttccgaatccgatagccttgaaaccgccgttattggatgggagcttctgcttcacgatatcggctttaatggtaaccccgatatggttggcttgtcctgtcaagtcggcagcggcatgatagtcggtaccatcctttttgaagctgctgtttctcaaatagcaccacagaatagtagccattcccagttcgtgggcatattcaaaagcctgtgacacttccactatctggcggcggctttgttccgaaccgaaataaatggtagcaccgacagctacggctcccatgttccatgcctctttcaccgtaccgaacattacctggtcgtagctgttcggataagtcagcaactcattatggttcagcttgacgataaaaggtatcttgtgtgcatatttgcgtgccacggcgcccaacacaccgaatgtggatgccacggcattacaccctccttcaatggccagctttatgatgttttcgggatcgaaataaagcggattgggggcgaaagacgctcctgcagaatgttctatgccctggtctacaggcagaatggatacatagcccgtattggccagacgtccatgtccgtataaagcctgcaaactttccaatgtacggatattcctgtcggaattcatccataccttatctatcatatccggtcccggaatatggataagttgtttgtctatcgtcttacatgtatggttcaggtagtactcagcctttcctcccaataaatctactattttcattttatttatttttattgattattctggtttatgactcccgttcacccagttttgcatccataaaaaggatagcacagtctccggctttcctcagatgactaacaatattgagtacattcgcttcatcttctacttgctcacgaacaaattgccacaagaagtcctgagtggcattgtctttctcttcggatgctacctgtaccaactcatcaatcagtttggaaacatgtttttcatgctccaaagcatgctcgaatacttcaacagggttaccccaaccttgtggaaccacatcgaccttgtctactttcggggttgcctcacgcttaatcatgtacccggcaatggcatatgcatgcccggtctcttctgcagactgtttctgcatccagcgagccattccggaaaagccctctctttccagataaaaagacattgataaatacaggttggcagaccataattctgctgtgatttgctcattcagagcattttgcaatttttcagtcatgatgaatcaaacttttaatgttaataataaatccaaattatctctcttctttaagaacaagcatgggcttgtttcaagatttcaattaataccggacgtatcccgctgataaaacattccacggcgatcaccattagaataagtcccatcagtctcatcatcacattgtttcccgtctctcccaagatttttaaaagctgggtggacgcgcacagaataaagaaggaaagaatgcagaccaaagcgattacgccaagcaatactattttgaaagtatattccgaagcatcttccatcaatgttattccactggaaatcgctcccggaccgcataacatcggaatggcaagaggtgtgatggttatatctttggaatattcttttcgttcagtttcattcagtttcacatgggtaaaatgtgcctgcaacatatcatatccgattttaaagatgatgatacctcccacaatccggaatccgtttgttgagatgccgaaaaaatgaaacagaaacctgcccgataatgtaaaaaggactaatatgataaatgcaatggtacatgctttcaaggcgatatatctgcgttctttcgtatccattccatcagtcatttgcaggaataccggcatcactccaagagggtccatcaaggtgaatagcgaagtgaaacacaatgttaaatatacaaatatatccatgatgacatatagtttattatcgattattatatcgcaaaaaacataccagatagcattctgcaatattaaattttgcataacatcaatcttaaatccataccgtcaaaaataaggtagtttccgttcgttttccttggcgaggatacgtaacaattccataaatgccgtacttacatatatacggtctgcatacagcccgctgatgaaagaatggaaggacatgcttacattccagcataatatgagaaatgtgtttacctgacgtgatatgtactgctcatgttcaagcaattcattcaaggcattcaatggcgttgtccattcatgtgtatcccgtttcatttcattgattacaacacatcctccatcatggcatatccgattcatcatctgataaaccttgttcatattgtcctgtgcttgggagttcagccaggagctaagtattggaagccgttcatcttcaaaataaacctgcaatgacaggtataaaccggttgaccatatttctgtattgatcaactcattcatggcgttttctattcgtttatccattatcactctgatcactctgaatattgaaaatccattactaatatcatgtgttattctcagtatataaaaattccattcgattgtgggtaacccataaaacggaattcttaaacgaggcttaaataataggataacttatcggcgtagacaaattgtcataaaaaatagcactatgatgtctttttgtcttgcctcccttgcagaatatccaataagacatccagttctctttctattccttcaatcttatcggaaatacagtccaaagtattatggtgcagactagctttacactcctgcaactctcttgacagagaaagtatctgtaaccaaagttcttcctctatgtgatagggggagttactattatctagtaccatagcaggagaaggcagaaaagtgctttggcatgtaatttgtatgataatgaacggtatgttccgaaagagacaggaatggaaatgaaaggatagaatattccacaaaagacagtaacaaacaaagggggaaagtcgttggagacagttgtctcgcttttaaaacaagttgctttcataatgtttattataagccaaccctgttccctggagttgtgtttatataaagttaagcgtgggaactttggtattaccgttcagaagtatccccatactcaacaacatataatacacaaagccccacgcctatatataacaaaaatctatatagatagaacgtggagcgtccaatgtattatccaattgttgtttcgaaattggggatttcctgaacttggataatgccttaacgctttactataaatcttctattttcaaaagactaatacaaatgtaataaaagaaatgaattctttgaaaggaaatatctcttttttttaaggggtggcttaatttttctttatttaaagtcttagaattactgcccaccaaagcccgtcacgaatgttttgaaatcctcaagctgtacattaagctctatatagtatagcagaatagcagaaaaacagaccatgataccgcaggtatataggtcataacccactcttccgtaagtatcttatctatttgacaataataaaaatgtaaaggaggataatgacatggacaatattcgtatcccaatacatataggttaacatataagggagaatggtcacggagtccacaaaccatagaatgaaaaaatatatttccatcgtgtacggtttatgtctctatccggatatttgaccggtgccgcaaatgcgcaatgcatactccacaaaaaaacaccagggaggaaaaataagtcatactgaataacgcctgtctgtaatgggccatggatacaaatgaactacagataatagctgcaatagatataacgatacaagcacaaaataatgtacgaacgtgtccatcagttgcatttggatgaaacagtaccactttatgcaatgtttggttagattgagtctgaacataggaccttaaaaattagacggatataaatttactaaaaatctgtggaaaagaggaatagaaaggcggaaatgtttttaaaacggctatgaataaagcgtttgtgaggacaaatgaggacaaaggcataaaacgaggtaacgcaaaaaaaagtaaatttatgaagtagaaaggttgctaaatcattaccccgtgaaaggtggtttttgatactccgtgctgaatttttctccgtatggcttcggttggtttacaaggcataactcattgatacttaattttaaacttaaaaaacgagtatggcaagaagtacattcaaagtgctgttctacgtgaacggcaacaaggagaaaaacgatattgtccgcatcataggacgggtaacgattaacgggattgtgacgcagttcagctataagtagagtatcccgaaaacgctttgggacgtgaaagggaacagggcgaaaggcaagagtgcggaagtacgtgatatcaaccttgcccttgacaacatcaaggctcaaatcatcaagcactacctgcgtatattcgaccgtgaagcgttcgtgacggctgaaatggtgagcaatgcttatcagggtatcggcagtgagtatgagacactgctcaaagcgtccggacgtgagaacgaagtattcaagaagcgtgtcggaaaagacagggtaatggcaaccaccgttcacgggtggtggcaagaaaccatgtggcagcgttcatcaagtctttttacagacggacggatatgttcatgctggagattaagcccgacttcatcaaggggtttgcagcctacctatcaacgaaagcgggacttcacaacgggacgatatgggaaaaatgcatgtggctgaaaggcgttgtcatgtgtgtgcactttaacggactaataccgaaaaaaacgtttgcccaattccacatcagccctaatgtgacggaacgtgagttcctgacggaagatgaactgaaaacgttgatgacgcacgagttggggatgtccaactgttctatattcgtgacatttttgttttcgccagcttcactgccctctctttcgtggacatcaaggaactaaccaatagcaacatcgtagaagtgaatggtgagaagtggatattgtccaaacggtacaagacaaaagtgccgttccaagtgaaactgttggatactcctttgcagattatcgagcgttaccgaccctgtcaggaagacaatctcatattccctaatctcaactactggtctatctgcaaatctctgaaaaaggggatgaaagagtgcggataacaaaggatatttcatttcagtattaaaactattaaacgggcgtaatttaattcgacagaaaatccggcttctgacagccattttttcacttcattccgagagtttgcagtttgactgccataaacagcaatatttcagcatggggacatagtttgcggatattatccacactttgtgctgttccgcttcctccatgtgtacagaatgggagtatctttttcccggacaaatcataaccggacaggaaactttttacaggagaagacagaagaccaccccaaataggactaccgataatcaatgtatcataatcatccatattctctacttttgtacgcagagctggaagaatatgattgtctctttcatttttgaaacggtcaaccacttcattatattcatcagaatagggttcttccggttcaatctccaccatgtcgcatccaataagttcatggataatgttggctacagtttgcgtatgtccgctccatgagaaatagactatcaatgttttccccggctctgagtgaggcaacgaatctatcttatcttcaacagccggagtgttgctgcacgaaaggaaggttaagagcagcattgccaataagcacttcagtttcataactatttttatttaggttttggggttatcctctgttaatttctatctgtccagctgtttctcatacagccacttcgacagcaggtcagctacttccacattgttcaaatccgacatcgggaagtgcgtattcccatgcagaccgacatcgggcagatgaatgaccgtcacgtcaccgcccagcttattgagcatttcggcccacttgcgcatgagatgcagacggcgtgtccattcgtaaagttccggatgttcgtctgtttcgggcaggttatccccatagtaaatgatgatgggaatttccatgtatctcttgaaaactgccatagggacttctattccttctgtttttttagaccgtgtcaagactttgccttcttcgggaacttgaccggttgggaagggtacacttccaccgggttcgtatgctacaatggctttgatgttcttcgttttgagcaaagtaaaccaacccaccggaccgccttgtgaatgagtgacaaatatggccggaccgattttgtcaaaaagagcagcataggcatcggaatagacatcgaagtccaaaggtccgatggtcggcgtcatctgccggaagtactggtttaaggcttcccggtcgcgactgaactgtacaccctcgaaataatcaggatagattcccacacggaaacggttgaaccattcttcttcatcgaataccggttccagtgtgacagcttccgtactccgtccggcatttccccggcgaggctggtcgacaagataggtggagaaacctttgcgaagaaatatattctgaaacccttcgcgtccgtcaggagtggtctcccatgttttggaaaactggccgacaccatgtgcaaaaacaagcggatatttccgtgcatcaaccggtttctgataaaatacataagcatggtcgccgtggtatttgtgtcccaatgaatcggtcagtacggtgccacctacggcaaaactgccttgttcctctatttgcagaatattccctttgtaacaattacagcccgacagtaaagcgatgaacgtcatgtaaaatatctgtttcttcatacacggattattttgggattttagactcctgcaaggcatcgtagcggctacccaccacaggaatggcagctacggctgtttccagttcttctatctcttctgccgtgaaacggatgtcgcaggcacgaaggttctcttccagatgagagagtttggtggtgcccggaataggcacgataaaaggcttcttgttcatcagccaggccaaagctatctgtgccggggtaatgcctcttgtacggccgaaagcgttaagaacttccacaatacgatagttggcgcgtatggcttcgggctggaagcgtggcaaggtctgccggttgtcgttggtaacatcaaacttggtatattcattgatcataccgcccaaaaaaccacggttcagcggactgtatggaacgaaaccgatgcccaaatcctcgcacagctccaacactccgttcgtctctaccatgcggtgcatcaagtgatattcgctttggattgccgtaaccggacatatcttgtgcgcacggcggatggtatcaacgtttacttcacacatgccccaatgcaggattttaccttccttgatgagtttgctgcatgtttcagccaccgcttcaatcggtgtgttcgggtctatgcggtgctggtagaacatgcccaatgtttcaactccgagattgcgcaacgagttttcacaaacccggcggatgttggccggagtgctgtcctcttcggttttaatctgcacaccgtttacaaacttatgtccgaacttcgatgacacaaatacccggtcggtatatcctttcaaggcttcgccgaccaatttttcattgatgtggtagccgtagctttcggctgtatcgaaaagggtcaccccacgttcaacagcttcatgcaccagggcgatttctttttccctgctcgggtactggctgcggttatggttcaagcccatacagccatatcccattgcagaaacagtgaatgccgtatttccgtgtcccaatgttcgccgagtgcgcaccgccgccatgcctgcagggatgttgtttgcaacttgttgtttccccatccatacccgttctgctgccgttaccttgttcaaggtaggcccgacacacatggcagctcctgtcaatgccgccattttaaggaatctccggcggctcatatccttgtctttatccatatttgatagtctttaaattatttctgttgcaaagttaacgtgacagaattgataaactttttttgatatatatcatctaagctgaatgatgtattatcctgtattccaagcgatatttataggcaactatctttcaaaatcgtatatattcagtcctaaatccggattatatgtgcgacttatccgctcgctataatcttccaccacgaactcccctgcaccattctgtattgcggaaagtagatgtccggctaaagcggaatagtcgctcctgccgacggttatatgcaaatgaagatatacctgctcattcatagatgatatattccctgtaaggttggatatttccatttgctcccggaatgtcttatcatcatatgcttttgtcttgggattgaagaaacggagggtcagctctccgatagcaccaatcccgttgatagaacccgacagaattcctttctccttgcagaaagcattcagggctttcacaatttcagtatgattgttaatgctgacaatatacttgttgccaattttcttgtacgaatacatattcttttcgttttgtgcgtttgccggagcaatcagtaccccgacaaacagcaagataaacaataatttctttataaaatgccccatcagtacacttatgactgtctctgttttgattaatcttaccataatagataaaattatcccacatcagtgctttccacttttgtttttaatctgcacaccgtttacgaacgttaccttgttcaaagttggctcttccttcttattttccatattctataatctgtatttagaagcctaaaacaaccaaaaccaaccagaaataaccaaacataaacctttaattatcaatatattctaaaaattaacactttcagactgctttttgatggttcccaaatttccacatatttttgagacatatttctgacgtggagaatttgcggagcttattttttgtcatttcgtgtagatagttgacaagggtttacatccgtttacaacgagcgacaaattccgccccgatatgtgatgatagtcacatcgtgtagaaaggcgacaacggtttactactgtttacctccgttcaccacttcagatacatgataatgaagaaatgaaattagtaaacgataagcagtatgaaagtaaccaagaaatgtgctttttgtggtcagtcctttgagacccgaagcggaatgcaacgctattgtagcgaggcttgtcaggcagaatccaaacgaaccagagcaatgcagaagaacaacctcttcaaactggctcagccactcatggagatacaacatcaggagtatctcaccttttccaaagcagctatcctcatgggctgttctcgtcagtacatctataaacttgtagccattggcaaactgaacgcttcccgtatcagcaaccgaatggcattcattcgtagagccgacatcgagcagatgttggcaagcaatccctatcatcgtaccctacccggcagtacctctgcaccgagaaagtccgcttcgtcttccacatccctcaaaaagaaaaagagggaagagaaaaacgatgaagtgctggacttctattcgggtgaagaggttatggccctttataaggtcaagcaatcgtggctttatacctctgccaaacgcaacaagatacccatttgccgtatcgctggaaagaactattacagcaagaaacacattgatgagttcttcggtgttgccgttgacatcagcaaaatcacccaatggctgacagccgagcaagtggaagagctcttcaacatgaagcccacagccctccgtgcatacacctatcgccataagatacctaccaaaagagaatacggtcgtacctattactcccaatcccatttggcggaacttcgcagaactgaccttatgagtgatgaaaactactacaccgtagaacaggtacagcagatttatggactcacctctgccaatatttgccatatcgtcaaggttaagcacatcggaaaggtcaaggtgggtagaaagaacctgcttttgcgtgctgatgtagagcgtattatggctgaaagaaacgaacaaccataagcaaccgccattattcagcaattatttcaaaatgattatcgtgattgttctcacggttatttcattgtattcctttgcaccgacaaaatcagtattaacaaataaaatcaagaaaaatgaagtgtaaaaccgtaacgctacgaaagcgtaagattaagaacggaacccagtattcactctgcttggactactatcccggctatcgtgacaatgccaccatgaaggtaatcacacgcgaagcattgggcatctacatctttgccaagcctgccaatcagcaggagaaagacttcaacgcacgcatgatgaagaaggcagccatcctgcgtaaccaacgctatgaagccattttcaacgagaatcatggattctttgacaagaacaggatgaaaggtgatttccttgcctacttcaaagacctggcaaacagaaagaacatcaagtggcaaaacgtttacaagcactttgaacgctttgtaaacggcaaatgtacctttgacgaagtggatgttgatttgtgccgtaagttcatggagtatctgcttgatgcccctcagtccatccacaccaataggaaactgcatatcaactctgctgcaggctattggtcaacattccgtgccgtactccatacagcctaccgtgacaggaaaatcaaggagaatcccaacccattcttggatcgtatcgaatgtattcccactatcaaagagcatttgagtgaggacgaactgatacgacttgccgaaacaccgtgtgaggaggatgttctaagacgtgtctttcttttcggatgcctcacaggaataagaaaaagcgacatcacacagctcacatggcaacaagtccaaccctataccaatggcaggatgtatgttaccacccgtatgcagaagacacagcagattatacacaaccctatcagccaagaagcccttgaacttcttggtgaacattgtgaaggactaatcttcaagggatttaaggaaaaaatgttgcaaggaccactgcaacgatggctggcagcagccggaatcaccaagaaaataaccttccactgctcaaggcataccatgggctcgctccatgtggaaaagggaacagacatggcagagattcaggctttgatgggacacaagaacattactaccacacagatttattccaagttggcttccgaccagctctgcaaggtggtggataaaatcacattgaagcgtaaggctgaacagtaatactgcatcaacgcaaaatccatcaaggggtgtcatcagctgacatccctttttctgtataaaaagccctttctatggcattttgagtatgattttagagtatgatattgcgtcaatagttaacaaatgtagacaaatgatgcaacagtaggcaataatgagtgataattgaaagagctccattacttttacagaagaaatgaatgaaaattaagtaataaccgcaaaaaaacatgaataatatggagtcatctatcaaagaaaaatatcttatctggacggctgtcggcttggcgatttgtgtcatttctctcggagttaccattattataggaagcgacttcggtcatgacaactttatcaggttgattgtctttgtttgcagcaatgtgttcggatggttagtatatctcgtcttccagtcgttcatctttgatgcctaccatatttataaattgaaattcggcaaaaaggagaaaccattggaggtagaggctgttgctccacaagaggttattgctccgatggctgaggagaccgcaatagctgaagaaacatccgataaagagccagtacaagaaagtctgcctattgaaatccacatcacctctcaacatcatcagaagagaaaggcttcttatgaggaaatgcagaaacaggaaatggagcagcgtgtccgtatggtaatggagtacattcattacataatgccccgtatagcagatcaagagaccatcaactatatctgtaccgaggtgcataattggatgtataatcccaactataaaccgaaaccaatcaagagaagacttaccaagcagattacgagtgtaccactccgtcatttggtgtggaacattactgctcgtttcatgaatcccaaactttacagtggcgataataaggccatattcataaagaccttgttcccgaaagagtttgccgacaccgagattgatactatcaagaacttcaaggtggatcccagaaagagcgaaattcccattgatgaacccgaaggagacaatttttctttccactatcccgaagattacactccaaaacagcttttgtaacccatttcaatagaataaccataagcagccagtaaagcgtaactgcctgtatcacatcgtttcccgaagaactttgcccatcatttgtggtcggtcatcgttattcgggaattattttgcaattatcgttcgtggaggtagtcacggctgtatcattcaagtcctttgcagcaagtcccactaaaggggtgagttgcaaaatggaaaataatatgattaccttcaacgaccttcctatggtcgtagctcagcttcgggatgaagtgatgagcctgaaaagcctgctcaccgagcagcgcagtgtgaataacgcaaaggcagtggacacccatgtccccatgtcagtagatgaagcagcggaatatctaggtattccaaaaggtacgctttacatgagactctccgatggaaccatccctgccaccaagcccggcaaacgctactgcctctaccgtgatgaactggacaagtggctggagtcttcccgtaagaatcccgtacctctatccgatgaggaacttagcgagtccatatcctcttcccaccgtcgcaaacccaacgaacgtaactggtagatgctatggaagaggataagaattacatcaacatgattcatggcgacctcgcacgagcaagccaggtacagagcggtatgcccgagaatgtcggtgtgatgaatatcaagactgctaaccgtaccatacttgaagcgtcccaaaagccaacgccacgttcgctgtgggattgcttctggtatgagggggaactctcctgtctctttgccgactccaatgtgggcaagtccattcttgccgtacagatagctgaccgtatagcacaaaccgacaatgtgctgtacttagatttcgagttgtccgagaaacagttccagctccgctataccaacgagcacggcaatctgtattccttccccgaaaggctgtaccgtgtatcccttgattgtgattccctccttgatgccaacttcgaggaggcaatcatcggtagcatcgagcagatggcactgcagacaggatgcaggatattcatcgttgataaccttacctatctgtgctgtgccatggaaaagggggatgcggcaggacggctgatgatccagctcaacaatctcaagaagaaatacgggttgtccctcctcgtcctggcacatactcccaaacgctccttggactgtcccatcacctcgaacgaccttgccggaagcaaacgcctgtacaacttctttgacagtgtatttgccattggcaaaagtgcccaagatggaagtctacgctatgtgaagcaacttaaggtgcgctatgggacatactcatacgatggcgacaatgtcatcatctatgagattgagaaggtcgattgctttctgcaatttgtacaccgagggtactccacggaaaaggaacatctgaagcagttgggagacgatgaatccacccgtagggacagccagatattggagctctcccgaatgggcaagtcgttaagggagattgcttcacaagtaggttgcggtaaatcaactgtcgggcgagtaatcccccgaagcaaagagaatgagaaagccatcgtcccaagtgtcccaccgtcccagcccttaggggaacgggagatgggacaggacgggacacccgataataccgagagaaaggaggccaaggcatgaaacgatattcattacaaagctacaaaggtatagccacacggcatacctgtccaagttgtggcgacaagcgttcctttgtctattatgtggacgaggagaatacacctctgcatccgtcagtcggaagatgcaactacgaaagcagctgcgggtatcattacactcccaagcaatactttcaggatcatcccgaatgccgtacctttgatgcttcttcttttgatgggcaaatgaaagaagtgaagagcaagagcactccgaccgagccaatgaaacctacgcccatcggctatgttccgattcactatgtggagaaatctaaaagcgtgcagagtaatttcttccgctttctctctatattgcttggcaactactatggcagcaagtctcaggaggtgttgaaccgcttgttggatgagtatcgtttgggggcgacccgtgacggtgctgttatcttttggcagatagacaagaacggaaaggtgcgtacaggaaaggtaatgcagtacaatcccgaagatggacaccgtatcaaggaacaaggtgtagccatcaactggatacataacatactgaaaaagcagaatgtattgccagaagaatggctactatcccaatgtcttttcggtgaacacctgctaagcctctatcccgacaaggtggtggtattggttgaatccgagaagagtgccatcatcggctctgctatcttccctaactatgtatggttggcgacaggtggcaagagtcagatgaaagaggacaaacttcgtgtgttgagcggaagaaccgtacttctctttcccgatgcagacggatataccgagtggaaacagcgtgccgagagcatgacctattgcaaagctatcgtttctgacctcttggaaaaacacgctactcccaagcagaaagcagaccatatcgacatagccgactggattatttttcagatacaggaaggcaagttaatgtccactgccaaccacttggtagaagctgaaaaaatcctccaacagatgatagagaagaaccctgtactgcaaaagctgattgatgaactcgaccttgtattggtcgatgcaagtcacatcgcaagcgatgacaaaagccctccttgacagcaggagagcggaagccgtaggctgtagcggactgacaagggcttgcccttgatatagcccactataactacacgcttcgcttacgtagttgtgggctctcccgaggggattaaggctttgccctaatgacccacttagggcgtttctcccctgagcacccagagcaaagagtgaccctctctttgcaatctccgcttatgggttgtacccctaagaaccccttgcggttatgagcggacaaataaaagaaatgttagtcaataactcaaatcaaattcaaaaaaatggcaacaaaaagcagtatacatatcaagccttgcaatataacatcaagcgaggctcataaccgcaggactcccgaatacatgcgtaacatcggggactccaaaatctatatcgtacccgaactctctgccgataacgagcagtggataaatcccagtttcggcaatgtcgctttgcagacgcattatgacaacatcaagcgtatggttaaggaaaagactgggcgtgcgatgcaggaaaaggaacgtgaacgcaaaggcaaaaacggaaagattatcaaggtggccgggtgctcgcccatccgtgaaggagtattgcttatcaaagcagataccaccttgaatgatcttcgcagattttgtgatatatgcgaacagcgttggggtatcactccgatacagattttcatacacaaggatgaagggcattggctccctggcgaacccgatgcaggcgataaggagagcttcaaaattggggacagatggttcaaaccgaactaccatgcccatatcgtttttgattggatgaaccacgacacaggaaagagctgcaaacttaatgataacgatatgatggaaatacagacatcagcatccgagattcttgaaatggagcgaggacaatcgaaagccgagacaggcaaggaacatctggaacgtaacgacttcatccttgaaaaacagaaatccgaactccgtaatttggatgccgtaatgcgatacaaggagtatcaagtgaaatgtgccgagcaggaggttcaggaagcagagagtataacacaagccctacgtgatgaagccctgcaaaaagagaagcagagtgaaatgctcgataaggctatcagtgataaacgctccaaactgaacaaggagaaaggaaaccagttgctcggagcagttgctgattgggctacgggaaagtccaaagccttgaaaggcgacattgaggacttaaaatttgacttggcggaagcacacgaaaccatagccgaagaacgcaaacggacgcaggctgaaaccgccaaacttgaagcctacaagaaaacagttgcacagcagatggaaagtgccgttcgcaatgccacactcaaaaaggacgatgaaattaacaacttgaaagaccgcatttcgtggagagacaagatgctggggatgttcacaaaaatcctgatgcaaagtaatggcaccttcagaaaggcagtcgattcaatcatcaactttgccaaagatacatatcgtagtatcttcagccgagaggaggcaaagaccatcaagagtgtgatggaagcctttggtaaaaataaggaggattacagagctattggaactttcctcgtgttcacggcagacaaaaaagagaacctatccaacagcgagtaccgcaaggctgttcgcgaagtggatgatgttgctatcggcagatatgaacaggcgcagaagcgtggaaattctctaaaactgtaaggatttaggtaaaaaagcatgattcttgtaaaatatttctgcaattatttgttattagagacaaaaagcattacctttgcatcgtaaatatgatgatcatcggtttgtgccgagtcaatgataacagaacccgttagcatcccgtagaactgctggcgggtcgctttttttattactatgaaccagcgcccacgcacaatagaagaacaggtctcattgctcagagcaaaagggatggaatttgaagatttaggcgaagcaaaagctttgcttgctcgaatcagttatttccggttgaagtatttctggacagacctgattgatgactctacagatggtgatttcttgcctgatacatcttttgatatggtcatgaaacgctataatttcgaccataacctacgattggtgttgtttgatgcaatagaaatgatcgaagtagcttttcgtgctaaaatcatcaatcatatgtcaaaagcagcaggcaatggactttggtatcttgatgcatcattgtttgaagatgccgacagacatcaagagtttgtgcttaacttgaaatatgagtttgaaagaagtactgaaccatttgctaagaagtacattgagaaccatcccaattggcaaggggatagttttgagggtgataaccctgatgcttggatgataattgaggtggctactttcggcacactgtcgaagatgtataagaacttgaagaatcaattgcctcaaaagtcagccattgcaaatgattttggactttactcatcgagagagttttctaactggatagagataatctcgttaatgcgaaatatcatagcacaccattctcgtctatggaacagagcactcagcaagaaaatatcgaatatcaaggggcatagagacctttggttgaataacgaattctcagaaatgcagaagaaaaagccctatgcagtaacttgtgcattggtttatctctgtagagccgtaagtggtagcaaatctatccaagaaaaagtaaaggcgttgtttgagacaagttcccaagtcatacctattcataaaattggtattcctatcaactggaagaatgaacctctttggagataaacagtgagtctatctgtgtgagtttgtaaatggacctgtaaaaaggttcttatagagcataaaaactcaaacaaaaaataacagaatccgtcagcatctcgtaagaactgctggcgggtcgcgttttattaccgtgaaacaaatagatgtaccacagcatatatattaaatgagtgacttattgcacaaataagtgtgaacaggctaatccacataatttgaatgtaataagagagagaaattgattagttggctggaaaatctatttctaattgtaatcgagatattaatgtgttcagttcaatcaccttatagttggttattttatgtaaatcaataaacgatgtgatttccatttcacaatatccttgataatcacttatttcccattctgcgtctcttgctatttgagcaaccatgtttaaatatggcgcatcaacttccgagaatgacattccataaacatgtatatgtgtcacatcgtaaaggctatcaaagaagtctttatacctatgcaataattttttgacaggtttttgttgagatgcaacgccacttactgcggcatcttctgctaattgttggtgtaattgatgattgtcctccatctccattctccattgttcatatgcttctggatcatcgtcagaaggtggttctggatcatttactattatcatcttccgtaattcatcctctcctacacaatgtcctagaacaaattcttcattatcatcaatacagccatgtatgtgaagaatttgtgcggaaggaacaccatacatattctcaagagttttcgaataattaaaggttaagaaacgagatccttctcttatcaattcaatctttttgtcttctcttggagaattcagttgcagtatccaatttctaaaacaacttcttaaatcgctatatagtccatcaaggctctgctccacctctatttgggcatcattccacattctatcacaatggtcagacatcaaatccggcacattttcacttgctacagcactagcatattctaatatatctagtgaaccaagttgattctcgaaatcagaccaccactcatcatcacaacagccgtaggcttcttctatgtcttgaatgacagtcggttcattttcatataaccaatcacgaaaatttcgatatgaactatttatgccatggtgtaaatcaaaaccattaccaattatatataaatgtctctccatatgtgtgaattcatcttacctatgctattttgtatctcatacaaagatacataaactatttctataattagtattatcacttattaaactttattcagataatgtgatacggttagataataacttaatttacaaggtgatttataagaggaagaaaaaaacgttaattaacattccatttaaagagtcatatcttagttttttatctcaatatcatttcaaacataattcatgatttgataaatgtcaaataaatctgcttaaatttaaattttcacacttttattgcagtctgtaattctaaatcgacatacatttgcaccagaaaaacaaaacaggataacagaaaataaaaagaaagtcataaataataactattaaatgacgatttgaatatacaaatattggtgattgttaggataataatatcaaattgtcaaagaaagaaaaaagtgagtataaacccctcttcggaggaactaaatttggaaaggtatgaaaaagattgaaatgtttttaagtactgtgtttgctaataatagtgcaaattccaataagtgtaataagattaacttttggtgtccgactgggatgccccccatcttttgtgattttcaaagcaaatgaatttgagacacattagaattttataataatcgagcgctgtgaattggcagctcagtagtactaacgttctctcgaaactagagagactaattcagataggtatgagaaagattatagtttatattggttcaatattttcaaatcatcctactaatttgaatgccaacgactgcaacaatatcaacttttggtgtccaaccgggatgaatccaatattccatcatcagatcaagtattatcaagactaatggaataatagaacctacggcaatcaccaattataattagtattaaccaactttttacattaaagagcttaacagctaaaggtataaaaaagattgtaaaaatgactaatatagttgataacaatagtttgagaataaattacttgtgccccactggtatgatccctgtcttttataatttaaagtcaagcaagagaggaaagtaaatagggtttagtttatgcatagtaaatgtaagatttacttgcaacaggtaaaaagatttttaaggttaacaatgtatgcggcatgctaaaaagtgattattatgttggaagttgttctatataagtatttactttttgtcgttcaaaagatatgacttcaatatagtaaacatacactttttagtttgcccttatttttcgaataagatgagtgagtcataaacatcagttacatattatgaatactttcggctctatcacgtatgaattttttaacaataaaaagaactatcattttgatttaacaggagcttttagtaacattattgaagaaagtgaagcaatagaatatgatgatgacgacgatgaggatgaattcgatgatgatgacgatgactaacatctcattaatccatagcttttaagtttattaaggcactataagatattttgtgtaaatggaaaatacgggattcaagtttgagtctcgtattttttattttatagatttgcaaaatgaagaagattatgaaagaaaagaatcaagtagtgcccgatgaggtgttaagcaaggagttccttagccagttcaagacagaagcggatgtgagcaagtttctgaaacagttgcatgcccaggtgctggagaagatgcttgaaggcgaaatggatgcccatttgggctatgaaaagaattctgtgacagggaacaataccggcaactcccggaatggcagttatccgaagaaaatccagaccgaacatggagagtctgtcatttctattccacgtgaccgtaacggccagtttgagccgatagcagtgcccaaacatgaaagtcgtggactttctatagaaaagctcgttatctccctatacgccaaaggaatgagcgtttctgacatagaggaagagatgcgtgagatttatgaaatagagctctctacatcggccatttccatcattaccaacaaagtcaatcaggctgcccaggagtggcagaaccgtccccttgatcctgtttacctgatagtctggatggacggtattgtcttcaaggtacgggataacggcaagatcataaacaagaccgtttacctttgcgtcggactgaaacagaacggcctgaaggaagttcttggcatgtgggttggcaaatcggaaagctcttctttctggatgggcgtcctgaccgacttaaaagcccgtggagtgcaggatatactgattacctgtaccgacaatctgaatggatttacggatactatccgcagtgtattccctcagtcatccactcaaatctgtgtggtacatcagatcagaaattcctgtaaatatgtcgtttataaggataagaaagagtttacagcggatatgaagaatatctataatgcacccaacaaagaggttgcagccacagaacttgacaatctggaaaagaaatggggaggaaagtatccttatgctatactttcatggagaaacaactgggatgatttgactgttttcttccaattcccgctggaaatcagaaaaataatctacacaaccaatctcattgagaacctgaatggaaaaatcagaaagtacacgaaatcaaagctttcatttccttcggacgatgctgtaaaaaagaccgtatatctttcgcttatggagattgaaaagaaatggacaatgcctatttcaaactggggcttgattatgaatcaatttatgcttatgtttgaaaacagaatccagatataagaacaaacttacaactgaatcctgttttcatttacacaaaattctggacagtgtctttattaaagaaacaggtcaggacgctatatcctgacctgtttttgatgttagttaagtcctaatagttagtttgctttatttgctctcagcattagctattgatgcacgtactctgcttaatgtttccaatgtcatctgaagatatgaagcaatcattgtcaaaggtgctcttctagttatttcaggaaaatgttgctgtaatctagcgtatctgtcatttgctgattcgaaacgtaaaatgtcagcctttaattgtgataacattaaggaattttcaaaaaaactccgatatagataagctatatcaccattagcatcagaaagttcttccattatatcacgcggaatttcccataaaacactgttttctacagcatccatcataagatgtgttggctctcggttaaaatagctgtcaatacaccagacaacatctttttcacatgctaaatgttctatcacatccttatcatgctttaggtagtgctgtctaataaatcccttttctatataaaataggcaattacagatatcaccttcatttagaattatatcacctttttgatatttcttaggctgaataatatctgcaaaaaggcgaatattctccaacttaagtttgcgattagggcatgtttcagctataatctgttttgcaatgtcaaattgaatactcataggctaaagttatttatatccaacattttgtttcaattttgggttcaagtctatacttttttgtggaataggaaaaactgtggtatacccatttttctcatcagccagttggactcgctgatcgtatgatttgtgataaactccaaaacgcaccatatcttgtcgtcgccagccttcccatactaactccaacaaacgctctttcaatatgttctcaagcgtagcttctcgatatggcataccaacacgacctcggacttcgttcaactccaacgagccatcctcaccattacgtacctttgcctcggacttcatcaggagagcatcggcatagcggaatagcacgatgtcgttatccggttgtctaccgtcggaatgtgaggtcctatcaacctcatattttgccatacgagcaccagctgtcttgacataggagcttcccgtaagattcaactttagctccaatgggaaatactccaactgctgtccattgtccatcattacaggctttccatcaacctctacgatgccggcatagaagttcttttcaaagcgagcatctacatcatctgtgccgtatccgttggctaagactgttgagatattggcactggtaccattttccgatgagccccccaacgcaccgccatggttgtagtgtcgtgatcggaagagataccagaactgcgcagcatagaggttcttatccaacggaatggtgaatatgttttcgttggagttctcgttatgcacagagaaattatagctataatcgtcctccaaccgataacctacctcggcaagtttattgcaatatttgatacaggtctgccaagcgttgagtttctcaccatcgacggtgaaaaatatctctttaccgttccgtggaacgccatcagtccaattatcatcacaatatatctcggcattaagagccaacttagccaaaaggaaattagctacaggtgttgttatacgaccatagtagttacccatcttattactacgctcatttggcaacaactcggcaacctcctgcaactcattcacgataaaacggaaaacctcgctacgctcgctctgcacaacttcatcctgcggttgttcataggatgttacgatgggcactctgccatacatatccataatgtagtagtagaaaagtgctctcagagctcgcacctcagcttcgtaggccactctctgctcctcagataggttatggctatacttatcgatgatatgcagagatttgttcgataacacaacaaccttgtagaggtatttccaagtattgtagagtggtaaatcattaggactccacttatgctgatacatattcgtccacaaacctccatcgtaccagtcgccaccacgaataggtatcatggcttcgtctgtagtaagtgtgttatagtcataaattccacgacaggtcccctgtaaaccctcactgtctgcactgccaccaatgtaattgtagagcacagccactgcattaatatatatgttgttggcattgttgtaaatgtcttcttcataaagttgatctctagggtcttcagtaagacaagaggtcatcatcgttgccaaagcaaccatcaatatgtttatatatcttttcataactgtaagcggttagaattgaatactaagacctaacgaataggtacgatataaaggataggtgcgtttgtcgtcaatgcccaaagtgttgcttactacataactgtttatcattggagtaagaccgctatagcctgtgattgttgcaaggttgctaatgcctgccgaaagacgcaatgacttcacagccttggatttcattggaatattgtagcctatggtaatatgttcaatatttacatagtcacctttttccaaccaatagtctgaaacattctgatcaataatatttttttcaggagcacccttcaatacattgtagtcagggaatatagacatattggtataagccaagcccgtgccattgaatatcttatgaccgaaagcaccatttatctgcatggcaatatcaaaggacttgtaacggaaactgatgtttgatccaatagttaccttgggggttgcctgacctgctatatacctgtctccgccatcgctaaaatcaatctcgccatcatcattcaaatcttcaatatcgtaactgtagccaccaagttcattttctttaagccctttgcagtgaggtagatagaatacccccaatggctgacctacaatctgatatactacattattgtctccaccgttctgacctgcaccataaagcgagccaatcggagtaatatctgaagctgtcatatgcataccattatactctccactaagcgaaagtaacttattcttctggtaggacatattgaagttgatattcatctccatatcctttcgttgaatgggaactaccgagattcctagttcgacaccctggttagacatcgagccgatatttgccatcagtttatcgaacgcaaaggtcggaacgggaacatcatactcatagagcatatccgttgtctttgagtaatataattccgaggtaagcatcaaccgattatcccatatacctaagtcaaaaccgatattaaatgttgaacgagtctcccacttaaggtccggattcgtgttgcgtatacttcccattgttacggtaggtgcaccgttgatggatacgataccattctcctttacggtattaagtgttgtataggatgttatacctccaagatttcctgaccgaccatatccggttcttagtttcaacattgttataaagtcagtatcagagaggaagccttctttttttacatcccaacccagtgatactgatgggaagaatccgaaagtattgttatcgcttaccattgaagagccatctccacggagtgctgccgcaatagaatatctatccttgtaactatatgtgacactacccattattgaagcaagtgacgggtcttcatagctactgctcgtaccaccgaaaggacgcgatgatgttgctccgatgttattataggagaaatcatttgttgttattccttttgcctgcacccataaaccagtccttacctgtttaagatattctgcgccaacaacagcatcaaggtgtgagtctccccaagcattgttatatgagagggacacatttgtaaagtagtcttcacccttgaactctccacgataaacattgccttgcgcccacacccatgtaggacaaaattgagcatttcccgtagatgaatatgaataagagccgaaagccgacaatatcaaattgtcaaggatattaaatttcagccccaaatgtgtattgaaattccgttcttcggagtcatttttctcatagaggagtgctccggggtggttgatgtgtgatgcagccgagttcttcacccagttgccattaacatcagttcctgctggatatgtaggattctgtgcagctgccgagtaaaacagcattcgtgtatcgaaaatgtcgtgtatctttgacgagtagccatatacaccaaaatcgccaactaagcgaccatcgaaagccttttgtgtagcatcaagttttaccactaaatttcggtaatcgttaactttgacaattgtattatgatccataaaaccgaacgatgctcgatagtttgagttttccgaaccaccgctaaaagccaagtgatgctgatgtatcaagcccgtacgagtaattacatcgtgaaaattggtgttgtagccaccattattgtaatctaatccaagtgcctctgctgtagctatatactccgggccgttgagcatttgcagatgtttatacattgactcgaatccgtagttgccatcatatgatatttcgaaacctcgccccgttcctttcttggtcttaatctcaattacacctgaagcaccacgggaaccgtacattgccgtttcggtagcattcttcaaaatagtgaaactctcgatgtctgcgggatatatggtagatagcgtagcgatgtcagatgtcactccgtcaataattactaacgggtcattgccacccataatggatgtggtaccacgcacacggatactattcagcatagcgagcctgtcagtcccattagtggtgacgttcacaccggcagactgaccactcaatacatccaaagcattattcaatggtcccttcttgatattctcgggcctgatatgctctaatgatttagtcgccgaaatggtatcttgtttctctctgatattctgtacttgtgcatcaattttttgagcactacagatgaagaacattatgacaagacaaagactgactcttcccatcttgattcgttaaatttctgtagattccccagaccagacagttaataaatcttatacgcaatgtattataaagagggggattgggaatctgtactatttccctgcctgtccgtccgcttagccattgtatatttttttttgttatttcatatcagtgatgctgataatccaagcaagaacagagtaaacatctacctcttttatacataaatcctttccaaggactttataagcgcaaccattaactacattacattacaaaggtaacaataatttgtcatttgaagaaatttagaaaaaagaaaaagtcattatgcgtgatattttttatttaattacgacatttatcaaatacaaaaaatcatagaaggacaaaaatctttaaatgatttgattataaacaaactttaaatagttaaattgcaataatactataccatggttgttctttaccttaatgtaatactactgttatatatctggtcatttatctccttttgtcggatgcaaaggttgccaaacctcttttagaaaacgaaaagttcaagcggtaaaccatttggagcagtttcgtcctccgttggagagtaaacagctccaaaaacttttcttattcatcggcttggctgaaaactgcatccggcaacggagataaacgactgacgaaataatagcataaaacagcatagccccccttaataaggcaattttatcaatgctgttttcattcttttcagaggactattattttcgacagagagaaatttggcaagcggcagatttcactccctcaaaaataatagatttgaattgctgtcctcttgcctttattggaaattgtagtacctttgtagtggcttgtgcgaacgagccaagcaatgtggaaagatgggaacatcgaaccatcaataaagtaccgaaaagagggaaaataccctctaccaccgctctttgagtgttaagaaataataaaaaggttaaatcttcaccttttagaatgtacccctaaaggttatgcccatatttctgacttataactcacaaaatattgagtaataactggttgcaaatactataatctttaaattgtttctgttgcaaagttaccctcctgcgtattcgctttgctgtatcataatcacggatagcattaccattttcatctgaattaccgcaaagcataccagaagaattccgaaattttttcgaacggtatcttatccatccggtcatacaagtctacatgattggctccgggaacgatatacagttctttcggttcgctggcttcttgataggcatcctcactgaaatagcgcgaatgtgcatgctcgcctgcaatgaatagcacggggcgtggtgaaatctctttaatcatggcaaacggatagaagttcatcaatgccgcctgactggtaaagcgtataccttgatagcgcggatgatagccacgcaaggggttgcgatagtaatcgaaaaactccttctgcacggcattggcatttcccagcagtttctccggtgtgccaaagcggatacgtgcttctcccgtttctgcttccttccaacgttgttcggcaacttcatccaacagtttgcgtctttgttcatccgtcatcgaatcccccaaaccgttacgggtggcacgccccatatcatacatgctcacggttgccaatgccttgatgcgggggtcgagagaagccgcacagacagagaacccgccgcttccgcagatgccaatcacaccgatacggttgcggtcaataaacggttgtagtccgagccagtctacagaagcactgaagtcttccaccaatgcgtcgggcgataccgtgtgacgcggttctcctccactttcgccttgataggaagcatcaaaagccagagtcacgtagcctcgccgtgccatttcctgtgcatagagtccgctacactgttctttcacagccccgaacgggtgtccgatgatgagggctgcatagtgttgcgcttcattgaaatccttcgggaggtacatttcggcgcaaagcatgatatcatacctgtttttataaaagaccttacggacagtaattgtcggatctgtttgaaaagtctttgccggttcatcggattcagaaagcaccattccgttccgacagcgtgccgccatgataagtacttcgtctatctgagcctgtgtcacgccgttgtgcttggcatgggcaatgtgagtattcaactcattcttcacgccgtccaacaccgacaaggcagccacagtagacagttcacgggtacgccagtcgagattgtcacggctgaatatgtcaccgaacagatgagctttcagaaattggtccaatgccggagcaaatgtcagcacttctcctagtgccggacgaccgaacagtttcagctggttttgtccaccgacaacaaacatatccgaactctttaccggagaaggctcccggccggcttcatcctttatgccttgtgctgcacgctctttggtgagattcatcagcgtaaccaatgcacccatgctgcgtggaaagccgcaataggcatagagctgggtaagtacttctttttcttcgctcacggtcagcccacagtcaagtcctctggcaaggatcactttgaggctgtcctgattgccacgtgcggcatacatactgatggcggcaatactttgttctttcttgcttaacatattgtccttgttttgtgcctgcgtataaacgatacagcatatcaggcaggcgatggttgtaattaacttgttcatattgctttctgtttagtgatgaatttataagaacttgacaaacgccggtctttccagtcggatattttttcccgtattcttcagtaaccccgtatttcggtttctttcgaatatctgtatgcagttggcatccctgcaaaccactgccaaatagcaaccatccggagagatggcaaaacttcgcggataaagacctgttggctgaaatcctatttgaaccaatgttcctttttgggaatcaatggaataaacaattatgccatcttctttcaagtgcttggaagcatagaggaatttgccatcggatgaaacatggatatctgcatttccctctgcaacgaaagggtcgcagacaattgtttgtaaacgttccaacttgccttcattataggagaatacagttattttacccgagagttcactgatgagataagcaaatctgccattcgggtgaaaacatatatgtcgaggtcctgagccggaatccatctgtatgcggactactcttgattcatccaacagagaatgagccttacctgcttccggtcgtttgcctatcggaaacagatagatacaatctgttcccaaatcggtagcaagaaggaatttgccatcaggtgtaaaggtcacgcaatgcagatgcgattgttcctgcctttttttattcggcccatttccagcaaaacgaattatttttgtatcacgttgcaactttcctttcttatcctgtgagaataccgtgatgctgccacccttataatttgctgtcagaacaaagtattcctttggactgagagtaatataaataggaagttcaccgtctgtagattgcgagttaagcagagacagcagaccactttccttatcaaaaagcaaagcattggcagtcgaacttttcccttcatcatcgcctatggcataaattcgattaccagtgctatcagatgtaaggaaagcaggatttgaaatccctctcagcccacacggatagtcgacatcggcagtttgtccgtcaaaccggtacattctgacaccttcttcgtctggcttcatataacatcctaccaacagaaattttgcataagttcccttatccgggacatcttcggttgaccgcgcttgaatcgtagtgaagctaagccataagattaacatgacaaataaagcttttggtttcatcttatttacctttttggtttcacttgcaaaattacagcattcacatactgaagattagacctcaatcactgataaaattaccactttcatcgggcttggaccgggttaaatgttatctgtgaaaatggtaagacagtctgtgattagggttatatgttcgttgattgaatgaactaactttgtcgtcatggaataaaataaataagggatagaaaagaaacagctgttcctcagacagcaatgtcaatataaatacttatttttgtaaaaaacaaaaggatggttatgggagatataacaagaatagatacagttcagcagtactgcgaccttttcgaagtcgaagctctgcacccgttggtcagcgttgtgaattgttacgaggtgcagcccatcagacactcaaagaaactgtacaacatttatgctgtgttgctgaaagatactgactgcggtacgatgaattatggacggagcctctatgactatgaaaaaggctccatgctgtttatcgctccggggcaggtaatgggttctgacgatgatggcagtctgcaccagccggccggatgggccctgatgttccatcccgaactattgcgcggtacttcccttgcacatataataaaagagtattcttatttctcatataatgccaacgaagcactgcacctgtcagaacaggagcgcaaagtagtcattgaatgtataaacaatgtagcagaagaattgaggcatcctattgacaagcacagccgttctttgattattgataccatgaagcttctccttgaccgctgcatccgcttttatgaccgccagttcattacaagggaaaatgccaacaacgatttgttggcgcgttttgaattgttgctcaataattactatcattctgccttgccaacgagtaaaggtattccgacggtacagtattgcgctgaccaactgtgtctttccaccaattatttcagtgacctggtaaaaaaggaaaccggtatgtcagcaatcaagcatatccagcaaaaaattatggatatagccaaagagcgcatcatgaacacgcaaaaaagtatcagtcaaatctcagatgaaatgggtttccaatacccgcaacatttcacacgttggttcaagaagatggaaggttgcacaccgaacgaatatcgcaatgaaattataaaacaagcgataaactaactggtcttatcatcatttattcgtagagtctcttacaaataatactctggatataaccaacaaagcaattaatgaacaactttgaaatcttgaaccgataaacaaaaaagtttgatgatctcctgcatacacttttcccatcggatgaacagctgttgtccggtctttttcctgcggtaagtcaggattccgttcgcaatgtctccctttttcagataagccatgtccacaaaggacatcccccgtgtgtaaaagcagaacaggaacatgtcacgtgcgaaatcaaggtggggtttcagggacaagtccagtcttttgatacgcctgatatcatttaaatgaatggcccgtttcaaggtcttttccacacctgtataaacagacttgaacaggttccgctgtccggtcagtccgttctccaccgcacggttgtagaccgctttcagaatgcgcatgtagaacgagattgtattgggtgagttccccctgtttttcagataagcctcgtattccatgagcaagtcagagctaagttcgccaaacagtatatcgctacctttcataaaactgctgaaacttttgagcgcggctgtataggtttcagaggtccgtatctttcccaaacgtttcagccttactatctgttgccggatatagtcgttaaacgaaggttcttgtccgctgtcatggaaacgtatgacgatatcatccgctgtaaacggaccggattggcttaatgtcctgatagccttttccagtcggattttgtcccgtcttatccgttcccctaccgatagaagataattgtcccgttccatccctgcagggtgttgacagggaatgaccgcttcggaacgttggtcccattccgaagcgaaaagtttgtatccggtactgatctgcctgaccacacggttatgaatcacctgataatacagtgcgccctccctgccttccgcggacgaggacctgaatttggttctgattgttgccatagtgcagtcattttgaattgggattgtccagttgcttcctgatttcctgtgcctccctgaacagccggtgcgccagactgtccttgtaggctgccatttcatggttacggatgcggttcctgaccgagtcctcaaaagcggtcaccagcctttccacacgccggatcttttcctcgtcccgcttgatggtgaaatgcttctcaaggaaggcgatgtcgggatcatcccccggcaggcagatcctgatggctcggtatttcaaatcggcatctttcaaaagccggttcgtgcggtactggttgcagttggtccagacggaaatgatcagtgccaggatcagtgctgaagctgtcgttaccactgccttggatgcgctttccagacggtaggtcaccagtctgcgctccggttcctttttcagcaggaccattctctcatccagccgtctcactgtctcctttacagcttggcagtcttgactcaggcagtatctaatcttttccatctccccggcaaacgtttcggcagacaacggccagccttccgacaaccggacggtatggttacgtaccgctgctatttccaagccgtttttctccaccgcggattgcaggcgttccagacggattttcagttccgcaatcccttccggggaactggtccggtttccaactgcggggcttgtgccttccacgggcagcgtctccactttcttctcgatcctttcaaggcatccatagatgccttccaaataattttcctgtttcatctttcaaagttttttcgttatacatatggttcacaaactccttcctttcctgcgcttcttctttctccgcaggcgttccgcctctttctcgtcctccgtcagtgccaccgacggcatgaacacgccacccgtaccggtgacttcgaccaggttatcaataacagaaccatgactttgttcatggtacggttgcttttgggaaacgtcattttccagggacgtgacatggttatggtccaatgccgcatccagccttgaccagctgaaactgcggtcaatcccacttcccttgaatgacagaccgttctttataaagcggatgccctgcacttcattagtgttttccttgtacttgaattccatttccacgcccatttttaagagcttattttgaaattctttccatgtatctgcactcctcaaagcttccttgaccgcacggtatatttcgtatttcaccttttcggaagcatgcagcttttccgttttaacggactgtttgccttcggaataggtgagcgaatacttgtccttaagcatttttgtcactttctcgttgcgcctgaaatcgttgctgtcggaaatcaccttcccgtcgaagtccacccggttgaagacgatgtggcagtgcgggttgtccgtcccgtgatgcctcaccacgatgaactgcgtgttccgtatccccatcagttccaggtattcccccgccagccttgccataaacgcgtcggtcagcctcggtgcgtcctccggcttgaagctgagcgcgatgtgtcccaccggtttcgccacgtccggattcagcaggcattgccaccggaaacttcgcgccatctcttctgccgttcccagcagcacgccttccgaggcgatgatttccgcgtcgtccttctgcgtcacgtagcgtatgcagccgccgaacgagcggcctttcctgatcttccctatcatgaggctatcctcctttcggtctgtaatcatccatgatccgcttcagctttcccagcagcccctctatcagcagccttgtcctgtaaaagccggtctggtgcgagagctttgtcagctggttcaggttgttagccattcccgccaggctgcgcaacagtgcgttctcctccggtgtatgccttgccgtaacggtggccgccagtgctgcctccctgatatagaccgccagactccggccggacttccctgccctgaacctgagagcctcgtagctgacgggggagaacttcaccgtcacgcctctggtcaatttacgcgtcctgcccagtgccggacggccacattttttcttcatcccattcacatcgtttgtcatatgttttttctttttcgtccgtacttctttcattccaaaatctgcgaccggcgggagcggatttgccctcccagcaaccgccgggcgcggggagcaagggttttcgggaatccggaaacatacccttgctccccccacagaaaaatccccccgcattttccacattgaagcgggtacacaggggactgtgcatacatcgggtatactccacgcccggtaacaggctgtcagatttttctccactgctcgatgtcctcacggtaggcggcaagatgctccctggcaaggttctccagcagtccggaaacgctcatgccacgcccaccgagcctgcggacgatggcgtccagttcgtccctcacatcctcactgacgaacaccgtcttgcgcttcctaatcttcgggacggtgaggtatgtttctcggtactcctccagcgaggccctacgctgcctgccgctcgtccttcttctcacggggtcttccggttccggcggggtgtcctttcttcccgcttccccggacacctcttccgcaacggccccggatggaatcaccggttccgcatccgtaccggcggattctcccgaaccgggttccatcatgagtctttcccaccactcgtcgtggccggctccgggactacggccgttctttctgtctgcggtttcggataccgccattttcttccctttcgttttttcagtcggttcacttttcattgtacatggattttagatggttgatactgtgggcacagtctacccgtttgcccgattgtcggaagcaaataaaacgataataacaagtgctgtgaaacggacgggtccgattggcggggtttgccgtgttattcatattgttggatcagtctgacggtgatgacttcacaaatatacgcaccggaaatttcccactcttcgggaacggatctgaacgtctgtttactaaaagcaaatgaatattaaaatccgatttccatgacatctgatgacatataatgacatctgatgaaggggcggaaccatatccgggaacaatcatttactttgcagatgaaacaagtacgcatatggtgtcaaaggtagtcatcctgtcttgaaattcaggacgttccgccgggattcactaaattgcggaacggaatccggatccgaaaagagaatgaaacagatgtcaaacctgaaattacagtgattatggaaatagtgaacattgaggcaaggaccttcgaggcgatgctctcggccttccggacgtttgcggaccggctggacaccctctgccggctgtacggcgacatggaggagaagaaatggctggacaaccaggaggtgtgcctgctgctgaaggtcagcccgagaaccctgcagaccctccgtgacaacggcacgctggcatacacacagatctgccacaagacatattacaagcccggggacgtggaaagtatcatccggatagtggaggagcgccgcaagcgggctgaaagtatgggaaggtcgatctgaaaggccatgaaaaacgaatgtcgaacaaaaaaaagatcaagtcatgatgaataccgataaccgtctgctcacccgtgagagcagcgagcatataagagagttcttctccaccgtcgaacgtctctccgtttccatggagcgtctctttgccggcaggtcaccggcgatggcgggcgagaacttctatacggaccgcgaactggctgaaaagctgaaagtgagccgccgcagcctgcaacagtaccgtgacagcggtctgcttgccttcacccggctgggcggcaagatactgtaccgttcttccgacatcgagaagctgcttgacggctgctaccgggaggcgagaaccaggccggaggaactttagaaaagttccgtacgggatcgtgaatgaaggggcggtcggttgtcataccggtcgctccttcattttctttccaccggatgaacgactttaatttgctcgtaaaatacttatacacagagtgtttttttctttatgaattatgatccggtgacaacattggcataacatggcgggacatggaaacatttttccgatatggcaataagatacggggattccattataaaaaaagactcttattttattatgtcattatgttattctgaaattggggcgggccgttcgtgtaccggtgggacgatccgtttccgtaatggcggcacattccgtactggtatcattatcctccggcaatgccgtttcccggtcttttcggagtgaccttatgccggccggtgacaaccgcatgtccgtgtgtaaacatggcggcgcataaaaacaggcacatcctccgggctcctgtcccgtcggatgcacctgtctccgtcatgtcatatacagccggactcctccggcccatgcctctatctgagtatcggattcgagagcagtatcttgtaataggccactccgccaatctctaccggcatcctcgccatcatgaactgcacgctcttcctctccaccttcgcctgccgcatgagtctctgcacgataaaccccgccgagaaccttgcgcatcttttatccttccagacaatgaacccctcgctgtcatcggcccggcagatgtaccagtcatccgtctcgtcgtcgtgggcgaagttcacccgtccgccaccgaggattcccaattcgattgacatcgtctttgacagatagacggtccccctgctgtcaaggttgatggtccgctttcccttgtatgtgacttcctgcggacgggagttttccctgttgtatactatcagtgccataactttcttacttttccgttaaacaattttttcaatacatgaagctttccaccgccagcatctgacttctccatgcgaaaccgctgtgggtacgtaccgcgtccactatcctgcatactttctgcgatatggccgatgccgagatacccatgcattccgccagtgccttgaacgagaactgcgcctcatagaacctgagcatgaacatccggtactcctcgtaggagaacttctgccttacgaaacgcagtatgtctcttaccagccgctcgcacccgttcaggtcgtcctcggaaaggaattttgcctcttcgccacatcggaggaagaaatcatcttcagggtgtgcataccgattctcccttttaatctttaccagggccgcctttttgtagcatccgatgaaatacgcgtcatagtccgttatgtcctttccgggaaccagcacctgccttcttacaaaaaggtaggtgtcatggaaattgtcctcgtccagcattccgtaccggcgtaacgtccctctcaacctgtcataggatgcagtgaaccactcgttgaacagtctttccttttctgcgctcttgtctgccatagctttatatttttttgagttatacatggcctacacgggtaggcattcttatttcttgtgcttcctccagtttgtttttcggcggtctccggcaaggcttgccgtgaaaaaatacgctcacgcgaagcgtgaggaagattttttcacgtgcaaccagcccgaagggccgccttgcgggaccggcctgaaaaacaactatttttgccgcaagaaatgaggatgatggattccttccttctatctattgtctgtccggtgagaatttagattccatgcagcttttctgtctttggtatgtttggagaaatattcaaggatatgaaatgagaacggcaatacgtgatgttgcggaaggagcagatatgggattggaaacaggaagcgtgcccgggctttcatgcagtttatacggcggtgttgattttggggaggattacagggaagtgacaggaaagtcggccgttccggagaaattgtatgtgtacgttgttccttccgaaatacggagtcttttaaaatcatggaagacctcattcgggagtgtgtctcgatatttgcctgagacaaaattataagtcgcctattcatggataagtatttggaatatatcaacgacatgctacgatgcaataaagagaatcggaacggcagactgaaactcgcaatctgctgataatgcggactattctaaaacaagtgtggaaaacttgaagacatccgacggaaaaccttggaaaaagaagaaccggacaaagtctccgccttcaaaataatgctctattatgccacaggtgcggcattacttgtcattccggattggcttcccatgaaatccaccgcccgccatcaagaaaacggccggtgccatatggcaggtaatcgtagcgacagcctgtctttggaacccgttgtcaccctaaaggattttactgatatattattatgtcagtcctttttcaaatcaaaatacagcaaacgggttttcaaaggttcatcttgcggaatatcataatattgcttttctatcacgtctgttttatagagtggaacgaaaccgtttctttcataatacctgagaatcttttcctcattgtatgcatccaccacgataaaacggcatcctgtcttgttgtcctcatgacggaaccagtcttttatgaaagccatcagttgccgtcctacgtggcttgatgtaccctgatattccaggttgacccccagtcttcctatcagcacggccggatagctgcgtccacgtttaggatttacaatattgcgttgcagcctgtttttatcattgggggatattaatctggtcttgatactgtcattggacaaggtaaacaaggccacaatacgatgcgggatttcagtcgtcacccaacaatatgttttcccaaggagttcatccgcatacagatcggcatcattgagaaaaaaatcatcaaggtcattctcgccacaagtgaaaggaaggcaattcctccgtacttccttgttataggcaagcatgacacaatcatcatataaagaaataccgtccattgctgttaattgaaccggaatgaacgggatttctccaatacttttcgcaaccgtttctttgcctccactgataaccggggtgttacctttgcggcgttcttgtctgcactgcgtacgaaatcttccgccgtaacgccctccaaaaccggaatgttcttgatagttatagccataatattattttttgcaaaaatacaactttgttgttatacagccaaataatagcccgtcttccactcttttttccggaatgttcctccatatccggaaaagtctgtgtcacgccacccgttgcggtaagccgtttttctcaaggaaagggcaggcaataccggcggacgtggatatgggcaaaacaacccgcatatgcaatgcagagggagcaggagagccttcaccacagccggagagaaaagtggtttcatgccggggtacggcatgaaaagggggctcccggacagttcttttccttgtcgcacatgcactacgtcggtcgcagttttcgccttctgaatccctcttacgtccgtccctgcgctttcggagcgtttttccggcagaaaatttcgccgtacggaaattttctgccggaaaccgaagggaaaacgcggagtcccgcagggacggacgaactttgatgaggaaggggaaaatcatccgtttcataaataccatttcctcagatggcatcgcatatttccttctccatcttttccagcttatgggacaggatttccatgtcgctgctgatcttctggttggttatccgggcatatatctgggtggttttcaaatccgtatgccccaaaagacggcttacggtctcgatggatacaccgtgcgagagcagcacggtggtggcgttcgtatgccgggccacatgataggtcagccgtatcttgaaaccgcactgcctgccaagttccttcaatatggtgttgcatctgccgttgctcggtaccggaaatacatgaccgtccttggacagtcccttatacttctctatgatgcgcttgggcacgtccagcaggcggatgttggactcggtgtttgtcttgcgacggcgggtgatgatccagaggttgccgtcgaagaaggtctggagccggtcggtcgtcagtgccttcacgtccgcgtatgccagtccggtgaacacagagaagatgaagaggtcgcgtaccagttcgcaggtcccgcttttcaccggggtctccatcaacgtctgtatctcacgctccgtcaggtagcctcggtcaacgctctcgggggaattgatgtacccggcgaaggggttgaagggaagcgcaccgctgttgcgggcgatggagatgacgtgcttgagcccgatcatgtaaccccatacggtattggtgcggcatttcttctccgtacgcaggaaatactcgaagttgttgatgaaggtcaggttgagttccttcagggggatgtcgtcacggcggtatactttcgggacgaactcgcaaaggtgcctgtatatggtacggtagcggttgtatgttccctgcacgcggctgtgtcccactttcttgatgaactcctcgttgtgctgctcgaagagcttcagcagcgtctcgcgtttcacgcccagcccgaggcaggcgtccctcagcctggtggcggtgacatagccgtcggactgcatcagttcctggtaacggcggttcacgtccacgcgtatccggtcaaccgccgcattgattttctgcgcctcggcgctcttgcccgtggcacgtgccgttttcacgtcccaaagtttcgggggcacgtccagcttgcagctgaactgcttgatttcgccgtctaccgtaagacggcacatcagggggagatagccgttggctctctcgctgcccttcttcacgtagaagaggattttgaaggtcgatctgctcatactcgttttcatacttttttgatcgttacaaagttaatatcaagcgagttgtcctcaggtatgaaaaactgtgcaaattactgaaatagaatctgttgtgccgtttcttgttcctgttatatcagtaacgatatgggaactgaagtctttcgcagcttttatcggacctcctttttcagcttatgcagtattatgagttaaacacctaaccacttaatagactgcatttttgctgtattatcatcaaccttgctttttctttctgcgtttactttagatgaacaactggcccgcgaatacggcgccgaaggactgaccgcctgccccatgctgaaagaaggacaagttttttatgctgattatgccaagccggaaggtttttgtgacgaggcttggaaagcgatttaccaatatgcttttgcgttgtcacatggtgctggaaaagaagtattctattatggagactggatcagaaaaccgggagttgccatctgcagttgcaatgacggattacgccctgtcatattcaagctcgaagcgacggacgaagagtccgagatagactacacgcctgtccgttgaccaaaaatcaggatgtatacccttatcctgtaaaaatggtacttatccccgtaattcatatacaatccgaaccaacctgtcacagtaactttgtatctgttcctccggaacatttttaatagcgatttaaactaatatacaagtatggcaaaaaaagtattgatcttatcatccagtccccgccgaggcggcaactcagacacgctctgtgacgaatttatgcgtggtgcggcagaaagcaatcatgaagtggaaaagattttcctgagagacaaaacaatccattactgtacgggatgcagtacatgcagtctgtaccagaagccatgcccccaaaaagacgacgcggcagaaatcatcgaaaaaatggtggatgccgatgtgatcgtaatggctacccctgtctatttctacacaataagcgctcaaatgaaaaccctgatagaccgctgctgtggaagatacacggagatgaacggcaaggaattttatttcatcgtaacggcagccgaagacgaccgtaagaaaatgctccgcacaatcgacactttccagggattcctggactgcctggaagatcccgtaataaaaggaaccgtgttcggattaggcgtttggcacaaaggagagatcaacggaaatcccgccatgaaagatgcctatcaaatgggaaaacaggtttaagcgattgcaatgacagcccttttcaaagcatatatgttttgaatgcaaaacatatatgtttcgttttcaaaacaccggtgttttgaaaaaggaatcctttactgcaataaacttcatgcctccatgagcggttatatatacaataacaacataaaatttaaaagctatgggatttttatggtacattatcataggtatagcagccggctttctggccggtaaaatcatgcggggcggtggcttcggagtaataatcaatctgattttgggaatagccggcggtgtattgggcggctgggtattcggattactcggaattgcagcttccggtattatcggcagtctgattacggcgacagtcggagccattctgatgttatggatcgcttcgttgtttaacaaacgaaatgtagattaataacaacaggacatatagggtaacgcaaatccacccaattggcaagatctgcgttaccctgttttttcagctatttacgggaacacatcctatttcaacacaaccaataccttgaccgggccatgtgcacccaatacaagagcctgttctatatcagctgttttagaggggcctgagataaaagcaccgaaatcatatgtcatgttttccgtccgtttataggcttcatgcatattgttcacgatcgaattgcggtctatcagcataaccaggctgttggagataaaatacaatgccttatgctttacctggcgggtaatccagacagccccgttctcggctacaccaaaatggccttccacgatggcaaggtctgtattgtccaactcacgaggatcgtcgagatcgtccggattaaaggtggcacaggtaatactggacagattggaggcgatacggattgcatcaggaaaatggtgacgaataatatcgttgatatcgtctccaggctgcatcaggacgacttgccccccagcagctttcagagagtcggtaaactggaggattttatcttcgtaagtgatggcatccagcgtcagttccggcatatcgtaacgtttgccggtgtgacgacggatagcagataatatatcgtttttgctactcattgtcgtatcattttaagggcaagcatacttcacccctacattattttatcttgttacttttccacatttcattgaacgactgcttggcaaaagctggcagttcacggcccttcccccatgcattcaaagcgttgtagatcataaaacgaggcatgttattgactaccggggcaaacttcaaagccgtattgaacagtttcggacgttccatcaggaacttcatgccgccggacataatctttttctccgtactcgctttccctatcttatccaagtcctgacgccagcgatagatctgttcgccgaggtctatcttgaccgggcaaacattcgagcaagagaggcacaacgaacaggcagaaacattgtccgaatatttcaccggatctttcagcatccctagattgatcccaatcgggccgggtataaaatatgtataggaataaccaccgctacggcgatagaccggacaagtattcatacactcgccacaacggatgcagttcagcgtacggatatgatcgggacatgccaggatatcactccgcccgttatcgactatgatgatatgaaactcacctccttctttcggtttacaatagtgagaagtgtaggaagtgatcggctgccccgtgccggagcgtgccagcaggcgggtgaagacacctaacgagtcccgatccggcacgatcttctccattccgaacgtcgcaatgtgaacattcgggaaagaagttcccatatctgcattcccctcgttggtgcagaccactatctctccagtcgaagcaactgcaaagttagctcccgtcatggcaacatcggctgtcaggaatttctcacgcatatttttgcggacggcatgcgtcagataggtcgggtcggaattgcctttttccgtacctaacacgcgctccatcatctcgcccacctcctgccgcttgatatggatagcgggcatcacgatatggctgggatgaagtttcatccattgaaggatacgttcgccgaggtcgctctcgattatatcgtaaccttttccgaacaggtaatcgttcataccacactcttctgtcaacatggatttgctctttatcagcgtatgcgccttgtgctgttgcaggatttcctcgacgatcgcattatgttccgccgcgtctttcgcccaatggacaatcgctccgttggccgtggcgttcttctcgaactcttccaaaaggacatccaaatggctgttcgaataaagtttgatctcacaagccagttcacgcaagcgttcccattcgggaagcgaatggctcattttatcccgtttgacacggaccatccagagggtttcgtcgtgccaggcttcctgcttgcggttcccgatgaagcgggcagccgcttttgaatgtttcgtgctcataatccggaggctaatatttcaacaatatgaatcgttttgatcggaaggttgtcacgcttgatcacgccttccatatgcatcaggcaggaactgtcggcaccggtgatgtactcggctcctgtgctcatgtggtccttcaccttatctcgtcccatacagacggacacttcgggttcctcaatcgcaaacatgccaccgaacccacagcactcgtcgatacgtttcggttcgaatatctcaatgcctttcaccaaagagaggagatcgcgcaacttagaaaaatacgggatattccgttcactcggagaagaaagatgcaactcgcgcacaccgtgacagctattgtgaatgcttaccttgtggggaaattcagctttcagttccttgaccttcacaatatcgtgcagaaactcgcagatatcataaatcttcttgctgttcatacacacatgacctgccttttccagaataccgggatgattctctttcacgaaagcgacacaactggcagaagggccaaccacataatcgtacgaacggaacaattcttccatacgcagcgccaaccctgccgattcatgctcgaatccggcatttgccattggctggccacaacaagtctggtctaacggataatccacatccaacccgagacttttcaataatttataggaagcaacaccaacttccggatataccgcattgatataacagggaataaataatcctatcttcatattggtttattttaattaccacaaatgtaataattatttctgttactttgaacttgatccaaaagtaacaaatcacttatactcctgccagcttcggatttgtatatcgtccatgcccagcgtgcaaaatgcttcgataaaggcgcttgccagacgggcatttgtgatgagcggaacgttcagatcgatggcggcacgacggatcttatagccattattcaactcaccggctgaaaggtcgcgcggaatattcacaaccatgtcaatcttcctttcgtggagcatggtgagtgcttgaggttccatgtcctcctcgctcggccagtaaacccgcgtactggagatgccgttttcttcgagaaagcggtgtgtcccgcctgttgcaaagaggttgtagcctttcgatgccaacatcttggcggcatccaacatggccactttctgttttggcgtacccgtcgagagcagaatattcttttctgggatacggagaccgacggaaagcatacttttcaaaacagcctcggaaacatcgtcgccgatacacccgacctcgcccgtcgaagccatatcaacacctaaaacagggtcagctttctgcaagcggttgaaggagaactgcgaggctttgatacctacataatccagatcgaattcgttcttattaggtttctcgacaggtaaacctaacatgatgcgagtggccagttcaataaagttaatcttcaatactttgctgacgaaaggaaaggaacggctcgcgcgaaggttacattcgatcaccttgatctcgttgcctttcgccagatattggatgttgaacggaccagagatattcagctcttttgcgatctgcttgctgatacgcttgatgcggcggaccgtttcaacatacagcttttgtgcgggaaactggatagttgcatcgccggaatgcacaccggcaaactcgatatgttcggagatagcatacatgacgatctcacccttatcggctactgcatccatttccacttccttggcatgttcgatgaactggctgacaacgaccggatgtttctgcgacacgttggctgccagctgcaagaagcgttcgagttcttcctggttggagcagacattcatggcggcgccactcagcacataactcggacgaaccaagaccggaaaacccacctcagccacaaactcgttgatatcttccatcgacgaaagctctttccaacgcggctggtccacaccgatgcggtccagcatggcggaaaatttctcgcgatcttcggcattgtcgatactcttggcggatgtccccaagatattgacatgctgctcgtccagacgcatcgccaggttattgggtatctggccgcctgttgaaacaatcacgccatgcggattttccagttcgaggatatccatcacacgctcgaaggtcagttcatcgaagtaaaggcggtcacacatatcatagtcggtcgaaactgtttcaggattgtagttgatcatcaccgaacgccaaccttccttacggatcgtttccaacgcctgcacgccacaccagtcgaactcgaccgaactgccgatccggtaagcgccggaacccagcacgacgatggaacggtggtcaccctgatactgcacgtcgttttccgtaccgctataggtcagatacagatagttcgtctgcgccgggtattcagcagccagcgtatcgatctgtttcactaccggaacgatgccgtgttccttacgaaactggcggatctgcatcatacctttttctatatttccctcaaggccgaaggcgcgagctatctgaaaatcggagaaaccttgccgtttcgccttgcgaagcaatgaactatggactatggacgattgacaattatcaggattgcgatattcttttttaattgccaattgtccattgtccattgtcaatttatgcaactccttggaggtacacatgattccgtagagtttttgtaggaaccaccggtctatcttggtcagttcgtgtatctgatcgatggtatatccggcacggaacgctttggagataacgaagatacgggtgtcggtcggtttatggagtgccttgtcgatgtcggttatcaccagctccttgttttctacgaaaccatgcatgccctgtccgatcatacgcaaccctttttggatcgcctcttcgaaggtgcgcccgatcgccatcacctcgcccacagatttcatgctcgaccccaactcacgagccacaccatgaaacttacccaaatcccagcgcgggatcttgcagaccacatagtcgagagccggttcgaagaaagcacttgtcgtcttcgtcaccgagtttttcaaatcaaaaaggccgtaacccagtcccaacttggctgcgacgaaagccaacggataaccagttgctttagaggccagcgcagacgaacgggaaagacgggcgttcacttcgatcacgcggtagtcttcgctctccggatcgaaagcatattgcacgttacattcgcccacgataccgatatgacggatgatccggatagccagttcacgaagtttatgatactcgctgttggtcagtgtctgtgacggagcgatcacgatgctttcgccggtatggatacccaacgggtcgaagttctccatgttgcagaccgtgatacagttgtcgaaacggtcgcgcaccacctcatattccacttctttccatcccttcaaactcttttccaccaacacttgagaagagaaagagaaggctttttcaaccagtacatccagttcctcctcattgtcgcagaagccggagccgaggccgcccaaagcataagcggcacggacaatcaccggatagcctaactcggcagcagcccggcgggcatcttcggcattttccaccgcttcgctcttgatcgtcttcacaccgatctcgtcgagtttgcggacgaagagttcgcgatcctccgtatccatgattgcctgtaccggagtaccgagtacacggacgttatatttttccagcacaccactctggtaaagcgccacaccgcagttcaacgccgtctggcctccaaaagcgagcaggatgccatccggacgttctttggcgatcaccttttcgacaaagaagggagtgacgggcaggaaataaacggtatctgccactccttccgaagtctgtaccgtagcgatgttcggattgataagcactgtctggattccctcctccttgatggctttcaaagcctggctacctgaatagtcgaattctcccgcttcaccgatctttagggcgccggaaccgagtatcaggactttctttatatcttctttcattttcagactcttttattcgttaacatttttagatctgtcgtcccaattcctaaagcaaatcgacaaacttatcgaagataaactccgtatcggtcggtccgctacatgcttcgggatgaaactgggaagagaagaaaggcttcgtcttatgccggattccttcgtttgtcccgtcgttcatattgacaaagagcggttcccagtcagcccccaatgtgtcattatccactgcgtagccgtgattctgggaggtgataaaacacttctccgtccccaccatacgcaccggctggttatggctgcggtggccatacttcagtttatagatcgaagcaccgcctgctttggcaagcaactggtttcccatgcaaatgccacagatcggtttgtccccatccaatgccttgcggatattccggacagcaacatcgcaagtattaggatcgccagggccgttcgaaaggaaaagcccatcgtattccaaatgattgaaatcatagttccagggaacacgtatcaccgctacattccgcttcaaaaggttacggatgatattggctttcacaccacaatcgagaagcacaacacgcttcaagagttgagagttgaaagttgaaaattgaaagttgtcgaagcctacagggtaatgggtggtgatcccgtcaggtaagtaggcgacaatgtctttgcaagaaacacgatccacataattgatgctaccgtaatccggtatttcccctccactttcaccttctttatcggcggtaccgataacgatacgtcccatcattaccccgtgctctcgtatcttttttgtcagcgcacgggtatcgatgccggtgattccgggaatcttctcacgtttcaaccagtcaccaaggctttccacagcattccagtggctatactcttcactatagtcactcacgataatcgcctccgcatgaattttctcactctccatgaaggtaggcaagccgttctcttcgatagagaaaggaggcaccccgtagtttccgaccaacggataagtcagaaccatcaactgcccggcatacgaagggtcggtaagactttcgggataaccggtcatagcagtgttgaacaccacttcgccggccattgccttgtcaaaaccaaaagagaagccgtgaaacatgcttccgtcgtctaagaccaatgttgctgtttttcttgtcattttcaatattcaattatcatttttcaattccccaatattcctcttccatataatgaatgaacgcttcgttcaccattcgtacaccaccaggtgtcggataatcaccggagaaataccagtcgcccggatgatcaggacaagcggcatgtaacccttcgagtgtctggtagacaatctccaccttcgcacgtgttcctacgggggtaagcagttccaccatcttggccgaaatttcctcgtcggtgaaagacgcataaatctccttcacataatttacggtcgcatcgcacggcataacctgctgccgcttggctttcttataggcatcgagcagaacggattccatccccttgtccactaaaagtgccacggcagccttgaacgcgataaattcgctcatacgagacatatcaataccgtaatagtccggatagcgcacctgcggagacgagctgaccaccacgatcttcttcggattcaggcggtccagaataccgatgatactctgccggagtgtcgtaccgcgcacgatactgtcgtcgatcacgaccagattgtcctcgaaaggcacgatgcttccgtacgtgatatcgtacacatgggcagccagatcgttacgactgtttccctcggcaataaaggtacgcaattttatatctttgatcgctactttttcacacctaacacgcatggacaggatttgttccagttcttcctcctgaagcaggtggctgcgatcggcgatccattcctttttcttcttgttcaaatattcgttcatgccctcctgcaatccaaagtaggcgacctccgccgtattcgggataaaggaaaagaccgtatggttcagatcgttgtccacagccttcaagactgcaggtacaagattttcacccaaccgtttccgttcgcggtaaatatcccgatcgcttccacgtgagaagtaaatgcgctcgaacgagcaggccttattttccttcggctctacgatctgcgacgtatgccaattaccttgcttgttgatgatcagtgcctctccccttttcagttcatgtacatcttcggcaggcacgttcatggccgtctggatcaccggacgttcgcttgccaggatcacgatctcgtcatcggcataatagaacgccggacggatgccccagggatcgcgcacgctgaaagactcaccactcccggtcaatccgcagatcacgaaaccaccgtcccactgcggggcacaacgtttcaggacattcgacaggtcgacatttgcctcgatcgcatgggtgatattcattcctttcagcccttcggcttcgtacttccggtacaggcgttcgacctcacggtccagacggtgccccacctgttctagcatgatgaaagtgtcggcataggcacgcggatgctggccgatggctgttatctcttcaaaaatatcctgtacgttagtaagattgaaattaccgcaaagagcaaggttcttggctctccagttgttacggcgtaaaaaaggatggacataggaaataccggatttcccggtcgtactgtaacgcaggtgtcccatataaagctctcctgcaaagggaaggtttgttttagcaaaaagcggatcattcagtttgtcgggcggcaaatccttgtaatactcatgaacggctgcgaatatctcggtaatggcttctgtgcctaatgctctttcccgaaacatatattcttcgccgggactagcttccaacttgacgcatgctaaaccggctccttcttgaccgcggttatgctgcttttccatcaacaaatagagcttattgagcccatacatccaggttccatacttctgatgataatattccaaaggctttagtaaccggaccatggcgactccacactcgtgtttaagtacttccatttggttctatcttgtttattccgactgcaaagatacttacattatattacataatgttcatataaacgaagtttatttgacacattaatagaaataatcattttatctaccatttagttaaattattctataaaacaatattctttcaacaaatctaccaaataaaaagaaaaagtcctttcatcacatacggatcgtaagaaagcaaaaggcttttttatataatcattatcagagcgattttgttctgggaaatcgcttttggatttctcatttacacaaactgactttataaacaaaatgcggcatgtccacccctcggtaatgcttaatgaaggttgccactttttgcatgccattgcgccgcgctactttttgggaagcaatattggtatcccgtatgatcgaatagacctcttcgaaaccaagcgtatggaaagcatactcccgacaagcgacagcagcttcgatagcaaagcccttatgccaaaactcctttttaaaaaggtaaccgatttcagggactcgttttccgtcaaattcctgataagtaataccacactgcccaattagttcgttgctacctttctcaaccactccccataaaccgaagccgtcgtgccggtaccgtccgaactgcctatccagccagttttgcacttcctgatcgttgaatgccccttcataggcatacatgacttcatcgtcctgcaacagtttgcacacatccttaaaatctccttgttccaatccccgtaataacaatcgttccgtttccagtattttcatatcatcctccacatttataaaatcatcaattccgaaacatttaagtttctcacctttaccaacactatttccggtaaaagaacttttacctcctcttcttctcccgtttttttccaatacacgacaaaattaacgcgtgcctctttcagttcatatcccttatccagccatttctcgatctcttttttgaaactgtttgaaaaacggacaacttccttatccgacgaatcgcaacaaccgccctccatcaaccgcaatggcatgccacttttcagatttccaatcgactcctgcctccttgcatctttgaaaaaatccaaccatacatcgcgatgcgtaagcaagaacagtaaacgttccggcatcggataataagccttatcgaaccggataattttttcctcattgccgaaaatttccggataatagctattcaaatggatcgataacttatttttggcacgtgtgagtgctacataaatctcacgtctcttttcatccgtgacaggctgattatcccctaataaatccctattatcgtttaaaagcagaaagacattatcaaactctttcccttttgccttgtgaatcgtagaaacaacgatagtttctccccgaacggcatagaaatcttccagcttcgattcaaacagatacgtttcccaatccgaacgatacttacagggataaagttgttcgaaattctgaataatcccccggcaaatttcccaagaagcagcttcacaatattcatttttaatagcttgttttgcctcagcccagcatacttcatctatcagatgaacctccgcttgcgatcctaaaatccggttgaagaaacgcatctcatccatatcgcacagacggaaaccctcgttcgactgaatcaaacggactggcatacgtttatctttcaacaaacaggcaacctgtatcgcttcccagtttgtctgagtcaatacgcaggtcgttccgattagaggggttgcacaaatatcctgcaccaatggtataaccatattcggcgactggtattgaacgatacggatctcaccttcatcctggtcgtgagaaatgatccgcgactgcttcattctttcaggtatagtttcccaaaaacgattcgcaaactcaaccaaacactttttgcttcggaaattgaccagcaaatcatgcgtacgagcaccgtattcatcgaccagctttctcatatatcgggaattcgaacgacggaaactgtaaatattctggtcatcgtcacctaccgcgaccaccttcaagtcctcatttttacgaataagcgcctccaccagtgcaaactcgtcttcagtcatatcctgcgcctcatcaatcaccagaaccgtttttgtaatacgatttatctctacttccccattgtctatttttcccacggcatcgataattacggaagatgatttttctaaagaaccttgcagccctaacaggtcgaaacaataagagtggaaagtcttgatctcaacataaccagcagcagtccctatcaaatcccataaccgtcgtctgaattcgctcgcagcagcacgagaaaaagtcagcatcaagagttgttcgtgcttgacatcttcctccaacagcaagtaagccagtttatgaacaagtacacgtgtctttccacttccgggtcccgccatgacgactatagaaccgggacggtcatccttgacaatctccaattgtgtttcggacaattcccccaataaccgctgaagtttggtattcgtcattttccggttaatctcatccctccgtttaccagggaaatatttttggaggaatgacgaataattcagttggaaatagtcgtcaacaaattccaatgcatcgctattaccggaaagcattttccgtacatattcaccgacaatattaatctgctggatcttattggcataaaacagttcgagtttatgataatcatcctgtttatattgcatcttattattcagaaccaatctgtctatctgcaatcggttgtataacaccaagaagccaccttcgatctgtaaggcttctatccgcgaaagatacaaaagagtatcttcaatgtcttccatccgaatggtatgcccaaacaattgtttcctgacatccttctcatacgcctctttcagctcaagcatggaaaactcgaccaaaatatttccgctctgttccagctcgctggactgtcctgttttctcaaacaaataacgaatgatgaaatcagacaagagatgcctcccttccgtcagttcttccagatcgaggaccgatccggtacgggcaatcgtgacataattatgcgctttatccaagtatatccgtttgatccagttcttttcagaccaaaaattaaggagtctgtttagcttatctggcgaaatactttttccagtctcgatctcggcttctttccgtagctctttcagattgaaagattgttcttttgcggtaaaaacggataaaaggtattcatcaagacggttgtaaagaaggactgtttcaagcgaacgattgctgttttcacctttttttatataagctgtcaagtcacaagcgtctgccagaatattctcttcccgcaacaagcgaatgaccagcatcacttcttgccgggatatccccaaatggtccgagatataatcgatacgagattccgggatctcgccatttacatgcttgcggcttctcgtcgaaattaattttttgatgatacgtatcgcttcttccttttgagtgtcatcaaaacgtggagagactgttattctatcgatagcctcctgagctgttttcgcaaggatactatcagcaaaaacacatggattgttttgcccccgccgaatataaccggcctcctcaagtgcggctattgcagtggttacacgcgtttccacgtccagaatattttcattccaaccagctttacgggcaagttcaagagctgacaacgaaatcctggaactggtaagttctttaattgctttccaaacctgctgtatctctttaatacgcagtttggtctggtttagcaaatagaagtgcttgtccagatcctcttcgttgaaaagaacgtaacaatccgcctcaattgattcgtcacgcccggctctaccagcctcctgcacataattttccaatgaatccgatatctcgtaatgaaccaccagaccgacatttttcttgtcgacccccattccaaaagcagaggtagcgaccattatccggattttattgtctatgaaatcattctgactggatgttttcatccgggtttccatctttccgtgaaaagtaccggccgaaaaaccatcctgctgcaagcgcatggcaactttggctgccgtacgggtacgggaaacataaactatagccggacaatcatggtcttcaatgatactccgtaacagtccatatttttcatcttcattttctaccttgaaaactttgtattttagatttttgcgggtacttcccgaacaaaatgttttaaagcgtatatttagcttttcgaaaaaatagtctttgatatcttgtattacattctgcttggcagtggctgtaaaacaggacaccggtatcgcctgcttccctcctttttgttcctgtaacagacgtatgaaatcacctatatatagataatccacacggaaatcctgtccccaagctgagaaacagtgtgcctcgtcaataacgaaacgaaccactttccgcccgaccaacaaccgttctatcgttttcgaacgaagcgactccggcgatatatacaagatggaaaccgacccttcttccaccctttggatagcatgggcacgttccaccgggtctaacatcccgttgatggtaacaacatccatgatttcatttttccacaggttatccacttggtccttcatcagggattgcaagggagagataacgacagtaagtccttttatccgtttaccgctcatcaaagccgggagctggaatgtgatggattttcctccgcctgtcggaaaaacagccaaaagagattctccttcaatcgcagcctccaccgctttctgctgcagatcttctccttcataggtacggaacgaatcatatttgaaaaaatatttcagtccttccttaccgttaaatgctcctctgcaataagcacattcgttattttcacaaggcgtatcccgcaaacgctccatcacccatcctaccttcgggtaattatgcaatacccaaagcggaatgccggaactgctattccaacaattaatcaaagacaggccataagccaattccaccggataagaggtgatcaattcagcaagcggagaagatatacagatgtctttactgaaacgctcaaggatactacccgataaatcatccagaatatccggtgcataatctatgtaatcaaaaaagccgccgaactcatccgtatcatgtaataacccgtaatagatcattttcagcatactatccaagcgttcaaaagcgttttgttcttcctcgaataacaacaacgatttcagcgaatcgtttaccgggttattgggtttatcagcctgtaacttatcatccttggacagttgatgatgcagtttttccgggaacagcaacgaggatagatagagcgtatcaattattttcggttgtcggcagcctgctttctcaaactgaggtttcaaataagaaaggtcatgttttaatatattatgcccgccaatataaggtacctgatgcaaaaaaagcaacagattatcaaaggaattttcatgaaaaggagttctgtcggatcggacagctccgatatccactacccggcaggtgttcagcgttacttccagatcaacaaaggttatgtctttcatgggctacatttttgttttgtagcaaaaatacattttttcttttatcctcaagcaaccacaccaaaaaaatcctttctcgactatctttcccatattgtcattttgataataatctcctgccgaaaacgagagatactaccactccttcggacgaagagaagccgagagaactctaagactcttggctcttgactaagaaatctcacattttcatattccctattacaaagaaattagtatatttgtctaacgttaaaattcaaattatgagaatttactacttcattatcaccctcattatcagtttttgtgtttcccttcaggcacaaaacaatgcggacaaattcaagcaacaggcacaaagtagctttgagaacaaagactatacgaaagcccgctatctttatatccaggcatacaaggattacgcaaatgaaggaaaaataacgcaggcaatcgaatgcggtacacaggcggcatccctctatcaccgcgagaactactatcaggaagcgttcgacctctgccgacaaatgagccagatagtggcaaatcaggaacatgcagagcaaaagaaactgtacggcctgcgttttgggataacaaaagagcgcctacaaatgtacatcaagctaagaaacaccgcgcaagcacagctccagcttaacatgctggacaacctggccgaagaatcaggcaatcccgaacttaccgaagaactgttgtacacaaaaaccgattatttctatatcttcgaacagaaaaaagaaggagacgcagcattcaacaagctcatcagccaataccgggagaaaaaggaatacggtaaaatcgacgaatgctatcaaaatctgatcgcaattgcccgcaaagccaataatatctcgttgctagagcaaacctacgagaaatatatggtatggaccgattccgtaaaaatgcttatcgcagaggacaaattgggtgccctgcaacaaaaatacgacagcagcctgcaaacgatacaggaaaaagaagaccagctatcagccaagcagtatatcatcgccgggctctgcacgttagccgccatcctaattgccgcattggcgtttctggcatttctggtcatacgcttcatactcctgaaccggaagttgaagaagatcatccagaccatcaccgagcacagcgaacaacagaccggattcatccaaagtatatcggcgcagatggaaccgacactagacgaaatgagcaaatcggtagccggattgcaaatcacagcacccagacaagcaaaagccatacaagcccgtatcgatgccctaaaacagttcggaaatcatatacaagaactttctttgttggaaaactccttgctggaaacctacgaagcacaatcttttaatgtcagctctttctgcgagaaagtgatggaacaggtaaaagaggatgtccgtccggacgttgaagtcactgctgatatcccaaagatcgaaatcaagacaaatgccgaacagctgcaacgcatcttgctacacctgctgagaaatgcggcgatctacacgacatcaggcaaaatcaagctggaattcaagaagaaaggagcccatatctgtcagttcatcgttaccgacagcggtccgggtatccctgtcgaaaagcaaatggcgatcttcaagccttttactgaaatcaaggatctgactgatggagacggactgggattacccatctgctccctaatcgcttcgaagatgaacggcacactgtccatagaccccgaatacaaaaaaggcagccgctttattctggtattgcaggtgtaacctgacacatacattgcctgccgcagacgagtgcgcatccctgtatcgtctgcggcaggtcgcatccggtaaatttcattccatcctctcctttattatcctccaagaatacgtatcgaaagaatacaatatactttctatttgaaagaattaaacaatagttttattacaaattgtcacacaaatcagcaaaacactttcaaatagaaacaaaccaatctatagaataaaaaagcttctccttatccgcactcaatattattacattttgaaacaaataacatatatttgccaagcaatttgataaacaaatcaaatacattacaaacataaggtcaactaacaatggatataaggagcaatttgaacaataagcaaggattatacgatcctgccaacgagcatgacgcttgcggcgtaggactggtcgtaaacgtccacggcggtaaatcgcacggcatagtggaatcagcccttaaaatattggaaaacatgcggcaccggggtgcggaaggagcggataacaagaccggcgacggtgcaggcatcctgttacaaattccacacgagtttatcttactgcaaggcatccccgtaccggaaaaaggtaagtacggaaccggactagtcttctttccgaaagacgagaaacagcattcggctatcctcagtatcatgatcgaagagatcgaaaaggaagggttgaccttaatgcatctgcgcaaagtacctgtcaacacggacatcttaggaaaagacgcacgggatacagagccggatatcaaacaggtgttcatcaccggatgtgacgaccagcaagtattggaactgaaactatacatcatccgcaaacgaatcgagaaacggatggcggcatccgatataccgaacaggaaagatttctacgtagcgtcactttccaccaagagcatcatatataaaggcatgctggaatcaatgcaacttcgccattatttccctgatctgaccaacccctacctgacaagcggactggcactcgtccactcccgcttcagcacgaacacattcccgacctggagtctagcacaaccgtttcgcctcctggcacacaacggggaaatcaatacgatacggggcaaccgtggctggatggaagcacgtgaaagcgtcctgtcctctccccgcatcccgaatatagacgagatacgcccgatcatccagccggatatgagcgacagcgcttcactggacaacgtgctggaattcttcgtggcgtccggcatgagcctgccacatgccatggcgatgctggttccggaaagtttcaacgaaaaaaacccgatatcggaagacctgaaagcgttctacgaatatcattccatcctgatggaaccgtgggacggcccggccgccctgcttttcagcgacggacggtatgccggaggaatgctcgatcgcaacggcttgcgcccggcacgttatctgatcacgaaaaacggcatgatggtcgtggcatccgaagtgggcgtaatggacttcgagccggacgagatagaggaaaaaggacgcttacaaccgggcaaaatcctgctggtcgatacggaagaaggcaagatctattacgacggcgaactgaaaaagcagcttgctggcgcacagttctaccgcgtctggctagcaaacaaccgggtggaactggacgaactgaagtccgggcgacacgtcccgcacaccgttgccggatatgacaggatgctacgcactttcgggtacagccgcgaggacatcgagcgtatcatcgccccgatgtgcataggcagcacggagccggtcggttcaatgggaaacgacataccgctggccgtcctctccgagcatcctcaactgctgttcaactatttccgccaacagttcgcccaagtgacgaacccgccaatcgatccgctccgtgaggatttggtcatgagcctaacagaatatattggtgctgtaggaagtaatatcctcataccgaacgaggcacattgtaagatggtacgcctcgctcacccaatactgaccaacacgcaattagatattctttgcaacatccgctataaaggtttcaagtccgtcaagctgccgatgctcttcgaagtatcgcagggctgcgaaggactgaaaaccgccctcgaccggctttgcatgcaagcagaacaatctgtcgcagacggtgtgaactacatcatcctgagcgataaggatgtggacgaaacccatgcccctatcccttcactccttgccgtcagcgccgtgcaccaccacctgatctccgcacaaaaacgtgtgcagaccgcattggtggtggagactggggaaatgcgcgaagtgatgcacgcagccttactcttaggctacggagcaagcgccatcaacccatatatgtcgttcgccatcctccaagatctggtggacaggcaggaaatacagctcaactacgaaatggcacgcaagaactacatcaaagcgctttgcaaaggtctgttcaaggtcatgagcaagatgggaatcagcacgatccgcagctatcgaggcgccaagctgtttgaggcagtcggcctttcgaccgcacttaccgatgcctatttcggagggacggccagcagtgtaggcggtatccgcctgcaagagatagccgccgacgccatcgccctgcatcatcaggcctttagagggacaatagacagtctgactcttgagcacaaagggctatacagtttccgcaaagacggcgagaaacacgcatggaacccggaaacgatctcagccctccaacaggcaacccgtttgggtagctacaagaagttcaaggaatacacacatctcgtagacgaaaaggatacaccaatcttcctccgagatttcctgaccttccgaacgggaaaatccattccgatcgaagatgtggaaccagtaagcgagatcatgaagcgtttcgtcacgggcgccatgagcttcggctcgatcagcaaagaggcgcacgagacgatggcaatagcaatgaacaagatacatggacgcagcaacacaggggaaggaggcgaagactccgcccgtttcactccccgcgaagacggtctctccctccgttccgccatcaaacaagtggcctccggacgtttcggcgtaaccgctgaatatttagtgaatgcagaagagatacagatcaaagtcgcccaaggcgcaaaaccaggtgaaggtggacagctgccgggattcaaggttaacgacgtgattgccaaaacacgccactctattccaggtatctcgctgatctctcctcctccccaccatgacatttactcgatcgaagacctggcacaactgatcttcgacctgaaaaatgtcaacccgagtgccgaaataagcgtgaagctggtatcggaaagcggtgtcgggacaattgcagcaggcgtagcaaaagctaaagccgaccgcatcgtcatatcgggagccgaagggggaacaggtgcttctccgatgagctccatccgctacgccggactgcctcccgaactgggattgtcggagacgcaacagacactggtcatgaataaccttcgcgggcaagtccggctgcaaaccgacggacagttgaagaccgggcgcgacatcttcctgatggccctgttgggagccgaagagttcggtttcgccacctccgccctgatcgtactgggctgcgtgatgatacgcaaatgccacatgaacacctgcccggtgggtgtcgccacccaaaacgaggaactgcgcaaacgtttccacggccgttacgaatatttggtgaacttcttcaccttcctcgccgaagaggtccgggaatacttggcggagatgggcttcaaaaggctggatgacatcatcgggcgtacggacctgatctataagcgcccacccacgccatctgcatccggcaaatacgcattgctcgatttctccaaattgctgcacatcccggcacaggctgctacaaatgccatacgtcatacggcagagcaggtccacttgaccggacatgtaaaagaccaggacattatcctgcatgccatgccggccatcgagcaccgacaagagatttctttggattatgccatagccaacaccgaccgctcggtaggcgccatgctctccggtgagattgccaaacgatacggcaactcaggattaccggaacatacgcttaatatcaaattcaaaggttcggccggacagagcttcggcgccttccttgcgcacggtgtcaacttccgcctcgaaggagaagccaacgattatttaggcaaaggcttgagcggaggacgtatcagcgtgatgcctccggtacggtcgaccttcgtagccgaaaacaacacgattgccggaaacaccctgatgtacggggcgacaagcggcgaagtgtatatcaacggacgtgtaggcgaacgtttctgcgtgcgtaactccggtgctatcgccgtcgtagagggagtcggtgaccactgctgcgaatatatgaccggaggacgcgtggtggttctcggacgtacagggcgcaacttcgccgccggcatgagcggcggtgttgcttatgtgtggaacaaggaaggagacttcgactactactgcaatatggagatggtcgaactctcgctgatcgaagacagcacgacacgcaaggtactgcacgaactgatccgcaaacattaccatttcactggcagtcacctcgcaagcaaaatgcttgacaactggaacaagtatgtggatgaattcatacagatcgtcccgatcgaatataaaaaggtcttacaggaagagcagatgaagaagttgcaacaaaaaatcgctgaaatgcagcgcgactactaaacggcagggatacgtacccggcaagtgaggagcgaccgtccttatgcgtgaggagtcaccgtccttacaaggtcccccctacctatccgggccgaattacgaagaaaagtatcagtataaacaatcaattaccaacatgggaaatccgaaagcattcctcaccatacaccggcaagaagccggatatcgtcccgttcatgaacgcatcgacgactttagcgaagtagaacaaacgctcaacagcagcgaccgccgcacacaggcttcccgctgcatggactgcggcgtgcccttctgccactgggcctgcccgttaggtaacaaacaacccgaatggcaagacctgctctataaaggcagatggcgcgaagccttccacgtgttggagcagacctgcgacttcccggagtttaccggacgcatctgccccgctctctgtgagaaaagctgtgtgctgaaactgagctgcgacgagcctgtcacgatacgcgagaacgaagcctccatcgtagaggccgcttttcgcgaaggatacatccaaccggtccgccccatccgcaacggcaagcgggtagccgtgatcggcagcggcccggccggactgacagcagccaaccaactgaaccgccggggatacgaagtaacggtattcgagaaatacgagctcccaggcggcctgctccgattcggtattccgaacttcaaattagggaagaacatcatcgaccgccgtatccggctgatggaacaggaagggatcgtcttcaaagtcaacacgatggtcggcaacgaagtatccgccaaagagatcgcctcgacgttcgatgccgtctgtatcgccatcggttccgaagtgccgcgcgacctccccatcgaagggcgtaatctgaaaggcgtccatttcgccctcgaactgttgtcacaacagaaccgtatcctcgaaggcatcgtcatcccgcctaaagacatcatcaactgcaaaggcaagaaaatcctcatcatcggtggcggcgacacgggaagcgactgcgtcgggacagccaatcgccacaaagccgctaacgtgacgcaaatcgaaatcatgccccagccgcccgtcggacataacccgacaactccctggcccctgtacccgcaagtgctgaaaacgagcagcagccacgaagaaggatgcatccgccgctggaacctcgcctccgtccgtttcatcggcgaaaagaacacactgaaaggcgtcgaagtcgaagaggtggaatggttgcctgcgaaaaacggcggacgtcccgaaatgtggaagacaggccgtacggaaataatcgaagccgacctcgtcttcctcgcgatgggcttcatccaccccgaacaggaagggctgatcaaagaactttccatcgccgtcgacacacgcggcaacatcgccgtcgatccgggtaccaaccggatagccgacaccaatatcttcgcctcaggcgatgccgtcagcggtgccagcctcgttgtccgtgccatggcctccggtcgcaaagcagcagccgctatcgacaaatacctgcacccccataaatcataattcataaatcataattcccatgtgtggtattacagcaatcttcaacatccatagcagcgccgccgaccttcgtcagcaagccctgaaaatgagtaaacgtatccgtcaccgcggcccggactggagcggcatctatcaaggaaaaaccgccatcctcgcccatgaacgcctctccatcgtcgatcctgcatccggcggacaaccgctgagaagcaaagacggcaaactgatcctcaccgtcaacggcgagatatataaccatcgcgaactccgcggacagttgaaagacgaatacgaattccagaccggaagtgactgcgaggtcatcctcgccctctaccgcaaatacggcgtgggatgcgtggaaaagctgagcgggatcttcggattcgctctctacgacgaagcgaacgactgctacctgatcgcccgcgatccgatcggcgtcatccctctctatatcggccacgacgacgaagggcatctccttgtgtcatccgaactgaaagggctcgaaggcttcgccaccgcatacggccagttccctccgggacactatttctatagccgtgataaggatttcacccgctggtatatccgcgactggatgcaatatgataacgtgaaagataatcctgccagcgtagaggaactgcacgatgccctcgaagcggccgtacgccgccaactgatgagcgacgtgccctatggcgtactcctttccggcggtctggactcgtccatcacctccgccatagccaaaaaatacgcagccaaacgcatcgagaccgaagggaaggctgatgcatggtggccgcagctgcactccttcgctgtcggtctcaaaggagcgcctgatttagtggcagccaagaaagtggccgattatatcggtactgtccaccacgagatcaactacacgatcgaggaagggctcgatgccattcgtgacgtgatctactacatcgagacatacgacgtgacgactgtccgcgcctccactccgatgtacctgttggctcgcgtaatcaagtcgatgggtataaagatggtgttgagcggcgaaggggcggatgaggtgttcgggggttacctctatttccacaaagccccggatgcgaaagcattccacgaagagaccgtccgtaaactgagcaaactctatatgtatgactgtctacgggctaacaaaagcttatgtgcttggggtgtggaaggtcgcgttcctttcctcgacaaagagtttctcgatattgccatgcgcctcaaccctgaagccaaaatgtgtcccggtagcgtgatcgagaagaaaattctccgcgaggctttcgccgatgtgctcccctcggaaatagcctggcggcagaaggaacaattctccgacggcgtcggctacagctggatcgacacgctgaaaaaggtgaccgcccaagccgtcagcgacactgaaatggcgaatgccgcccggcgcttcccgatcaacacgcctcagaacaaagaagaatacttctaccgtaccatcttcgaagagcattttcccagtgaaagtgccgtccgcagcgtgccgagcgtaccgagcgttgcctgctccaccgccgaagctctcgcttgggataccgccttcaagaacatgaacgaccccagcggacgggcggtgaaaggggtacatgaagcggcatactgacataccgatctccgtaacaaaacacactcaaatctgtatgttatataaaaaacagaaacaaacctctaaactgaagtttgcttctgtttttatatgaccttcactaatcccgcacgcaacggatagggaaataacaagctccgactgctgccgctgagacattattattaatcatatcattgtcgccatccaaatatggaagcatcggaattccctttgacaagatatcgacccaaaataagacagttccttctaactccgttgaattaaacttaggagtattggttttaccaaaccctgttgtctgtcccagtgcaggcacagcataaagtgaaagtccactcaaattatcaggagtattatcaccagacttccaccattgagcagccacccaatcacgactatctttattttccgccacattagaagccatcatatgccaccagtcaaagccaaaaatataatcaatatattccatgtctgcataataatttccaaatacaccatgcgtaaaacttgtcggaatatgccacccttcggggcaaagactattattagtttgtccttctatatcttgtgaaagaatattgtaatctgaaccaagattctggacatatggatcgtaatctcccgccacagccgaaaagttataatgcaaaccatatcgtttcttcacctcatcgctctgactttccacatcaaaactatcatctttcttataataatcatacatagctgctttctgatactgagtacctgtcgaatattcgttaagataaacagtttgagacttttggtcatccgttgcgctccgctgataaaccaaagaagttccatccttaaactttgtagcacgcaaattctctctcatccaataagacgctcctatcttgacaataggatactcaataccgtcagcatccgaaatggtatagggttctaacttatacttatcaatcccatttttgcattccttgacatttttagatgatgtaatcatcaatttggagatttcctccttccctccagttcccgcaataaaagctgcaagaggtgacacattaccattttcataactaccccgcattgtccaaccaatgttacctccggcaatattcctactgcctttagcacctcctagatatttcgctatatatccattggcaaggtctaccttgttatcttcacctacaggataaacggctacgacctgataagtcacgccattttgccccggaatacggccgaacccttccttacagatctccgcaacctgcttatcgccatccatcactttccacacgttggatttatcccaatctatatcatttatatcgatataattctcaactgtgacaggcatactgaaccgggttccatcagtcaagataaattccacatagtcatcatagaccttcacatcgctaaagaacgagctaccaccgcccccaccgctaccggcaggaccttgtgagccggtcggaccctgttctcccgtttcgccacgctcacctgaaactttcgcccactgcttacctccgtctacagaaagataaacggcagtatcattcttcttacccccgccaatcagaatggcatcatccggcaattggcttcctaatttcaattcaggaggtatactctgtgtattagcgccgattatattgccttcagaatctttcatcagttcgccgtcaagtgtccaataccaatttccatcttccgactgctttataccgattaggggggtattccctttttcgcctttctcgccgtgatagatcgtagccggttcctgattcttaaaacgtatcgtataaccgaccgtatcactgcctaaaaccacaggagtgacatccgtgatatagtcattttcgtccatcaacttttgaagagcatcaatattgctactggccgcagcctgccaggtttccaaagcttcgatacggttctccaatcccgaaatcttattccataaatcttcatcattatagcatccggtcataaacacagcagaaagagctaaccaaacacaaatactcgtttttatctttttcatttttctattatataaaaattcgattaataatactaatcagtcttgactaccggcatcgctggatgccggtagtcaagaccattcggtgccagttaccagcaccgttcagtgccgatgaccggaacaaattataattcacccggacgttcttcttctccgggaatatttcccacatacaaaggataggggaagcggtttcgacggggttccttcaacaacttctttgaatttgtgcttgcctgagtcgcaacctccaaatagtaagcccccttatttaactgaggaatgataaatgaaaaaaaagatgggtcgttgcgtagtaaagcagaaaccgggacagggatttccgttttatccgtatcggacacgaagaagaagccgaccgtctgcccttcagaaccggttatcttcacccggttgccttcgccgttaagaccaccgcccggagtgatccgaagattttcactgccggttgccacatcgacaactttcgtaatggtcggcaatccttcttccgtaccagcgacaatcacactgatgtttttcaaatcttccttaaattcgatacggggtgaacaacgtaaagttacattgttgaccgacggatcgaatttggcatccggacctataaacggaccgtccacgccaagtgaattattcgcaaacccgaactctacggtagaagcattgtaaagttctatcttagcctgggccatcaagtcgttataggcactctccaactcagacgccgtaaatttactgttcgttgcagccagcttgcataagtctttgactgaacgatttgcctgataagttacattaaaagaaaagtcatcatcacgctccgtcagcttattagcaactaatttgccggtaatgctacgcattttaggttcgtttaaagccataaatttaaaatttgattaagttcgattagaactatttccttttatggcgtttttcaagtaacgaaatccatatcaacaaccaaaacacactttattttggcaaaaaggttcaaacgggtaataaaaattaatacaaaaacccgttttgttaggatttattttatagatttgcatcattattaacgtagttctaatcgaactatgtctatttttttgtttccttttaattatcaattattattacaaatacgaacttccggctactttcgtagtacaaatgggattcctgccatttataagaaatcctcccgcatcggactgaacgtgtcgatcagaacaccagcttccaagcatatgcaaccatgcagaatacccggtttcatatatacgccgtcacccggacgcacaatcttcgtttcaccgtccgtcgtgaactcgaacacaccactcgctacataagtcgtttgcgtatgcggatgtgtatgcggcgttccgattgctcctgtttcgaacttgactttgaccatcatcaggttgtcgttataacccataatttgcctaacgataccttcacccgctgattcccatagcatttctgcctcaaactgaaaattgttactctcgtatttcatgattttgcaatttaattattacaaaaataatcgttttttcgtacatttgatgcattattaaatctatcaacatgaaaaatagaatttctactggggcgctcttcgccatgcttatgcttatggccatgcttccccgaaccggacattcacaagaaatcgatcccaacgcctattacgagatcgtaagcagcaacaacctggttctcgacaatcaagacagcgaagacgacgggacccagatattcatcaacaaccgtgtggagaaccgcgtgtcgcaggtatggcaactgacgactcccggctatggggtctataagatctgcacgcccctctccgataaatgcgtggacaacaacaacacgaaagaaccgggcccggttatccagtgggacaacggagcgaccaatatgaaccaattctggaaactcacgaagataggcggaaacacctacacgttcaccaacataacaaacgggttgaacctcggtatcagtgacgacgggcaaccaggaaaagcggctctccagcttgtcgctgattcgaccagtgccagacaacactggacactacgccggtcaaacatcaaaattgacaaggaggccctgcgcagttccagtgacaaggattgggagaacgaaactatcttcgctatcaacaaggagccggggcatacgacttatgtccccttcccttccgtggaaagcctgaaaagttcgccagactaccgcaaagcctggcttcgcccgaactcgccgcgctaccagttgttgaacggcaactggaaattcaattgggtaaaacagccgtccgagcgtccggtcaatttctataaaccgaactacgatgtttccggctggaaagaaattccggttccttccaattgggaaatgtacggatacggtactcctatttatacaaacatcacgtatccgcatcgcaacaaccctcctttcatacaaggcaagaaaggatacacgattatggacgaacccaacccggtcggctcctaccgccgcgacttcaatattccggacgactggaaaggaagtgaaatctttatccatttcgacggagtctacagtgcaatgtacctctgggtgaacggaaagaaagtcgggtacagccagggagcgaataacgacgcagagttcaatatcacgaaatatgtaaagccgggaaagaacgtcctggctgtcgaagtgtaccgttggagcgacggcagctacctggaagaccaagatatgttccgcctgagcggtatccatcgcgatgtttatctgttcgcgactcccaagctgcgcttgcgcgattactatctgaccgcttccttcacaggagatgacctgagcaaggcgatattcaatgtccgtacaaacgtgacgaactatggcaaaacagtggacgaagcggttgtcgacatcacgttgctggaccaagacggcaaacaggtggcctttatatccgatgttgtcaaagatatcaggaaaggacaggaaacgatcaacacggccagcgtcgaagtcaagaacccgcgtctctggtctgccgagactccctacctttacacggcgatactggaattgaaagacaagactggcaaaacactagaagctatgtcttcacaattcggtttccgcaaaatcgagatcaagaacaagcgggtatatatcaataatgagcaggtgttcttcaaaggagccaaccgccatgacatccaccctcagcacggaaaagcggttccggtcgagtcgatgatcgaggatatattgcttttcaagcgttataatctgaacacgatccgcacgagccattatccgaacgatgccaagatgtacgcattacacgactactatggcctctacgtgatggacgaagccgatatagagtgtcacggcaaccattcgatcagcaacaaggaaagctggttacccgcctatgtagaccgtatggttcgcatggtcgagcgtgacaagaaccacccgtccgtcatcttctggtctatgggtaacgaatccggtgacggcaaaaacttcgacaccgtatacaaggaagcccgcaaactcgatccgcgtccgatccattatgaaggcaaaaaccggatcgccgacatggattcccgaatgtatccttccatcgagtcgatgaagcaacaggacgaggagaagagcgacaaaccgttcttcctttgcgaatatgcgcatgcaatgggtaatgcgatcggtaacctcgatgaatattgggattatatcgaaaaccattcctgccgcatgataggcggttgtatctgggactgggtggaccagggtatcaacaaatatggcgaattgtctgaccgttactacttcggcggtggcttcggcgacaaacctaacgattttgatttctgctgtaacggtatcgtaactcccgaccgccaggtaactcctaaattgatcgaagtgaaaaaagtgtaccaatatatcaaattcaaaccggtagagttgaaggctggtaaagtgaagctggaaaaccgctacgatttccttaatctgaatcagttcgatttacaatggcagttgttgaaagacggccaaatagtcgaatcgggcgtattatctttaggcgatgcagctccgaacaaagacatcgaagtgacgattccttataaaacggctttggatgccggcagtgaatacttcctcaacctgtcagcccggttgaaaaaagattgcaattgggcgaatgccgggcacgaagtagcctccgagcaatattcactgaccggaaagattgcagtagctcctgtcgacacagctttcaacgacacactgaaagtcgaagaagaaaaagagcagatcggttttcgcgctccgggattcttcatcgctttcaatcctgagacaggcaagatggtttctttacgctatgccggtacggatatgatctataataaggaaggtttcgatttcaactggttccgtgcaatggacaatgataaacgggattatctgccgaccaccgtcaaaaagcaggcattcgactggaagcaggccaccgacaaaaagtcggtgaccattaccacgagcttggaagctaccgtaggaagcggaacccaaaaagtggtactgccattcgacgtcacctatacagtctatgcaaacggtacggtcgatgtagacgcgactttcaaagctggcaacgacttcaacctgcctcgcctcggcctccaggttgctttgaacccgacactcgaacaggtggaatggtacggacgcggcccgattgaaaactattgggaccgcaaaaatgcagcctatgtcggcctgtacaagaacaccgtgactggaatggaagaagcctacgtacgtgcccagtcgatgggtaaccgcgacgatgtacgctggctgacgctaaaaagcctcgataaccaaggtatccgaatcacatctaaagaccacctgaacttcagcgcactccacttcaccgatccggaactgtgggaactgacttacgggcatgacctcgacaatatccgccgtgcggaagtgattctaaatctcgattgcatccagcgtggtattggaaacggcagttgcggcccaggcccgcgcccacattatgaaattgaaaagaacaaaaactatagctactcgttccgcatcgagaacgcgaagtaacctatcggcgaatgaagacttaaccgccttgtttccacgcttgacgcgggatcgcaaaagaacaggcattatctacggccagttataacgcgatcctgtgcccagcacaggaataaggcggtttttattcaccgataaagcatcattcaaacaaagcaaccatttactaagcccctataaagaatgaagaaaatcttattgaccgcaggctttaccctattcgcttggggatcgacctgcctggcgcaaagcacgtatttcagcgacagtaaagaatggctccggaaagctgaggcctgcaagccggagttgagttatcagactatttctcccgtcaaagtcgtccgttccgtacaggacacaaaagcattccagggctggcggatggaagatgccggacaaccggatatcctcttcaacgagccgttcaaaaagcatccagccattaccctggatttcggcaatcattataccggctatctcactttctccatcaaaccgtccggattaaaagcagcagacgcacccgtccggcttaagttcacctttgcagaagttccgggagagttgaacaccccgctcgaaccttataagggaggtttggcccgttcctgggtgcaggacgagatcgtgacggtcatgagcgtcccccacgagatgacgatcccgcgccgcctggcaggacgctacctgaaaatcgaactgctgggcatatcgggcagtttcgacttcgtgttcgacaagctgaccttcaagacacaaacctccgtcaccaacgaagcaccggctttagcctctaccaccgatcctctggtccgggatatatataaagtaggcttgaataccctgaaagaatgcatgcagactgtctatgaagacggccccaaacgggatcgccgcctgtggatcggcgacctctatctcgaagcattggcaaacgcccatacgttcaagaaccatgaactgaccaaacattgcctgtatctgctcgccgccttcgccaacgacgaaggcttgctgcatgccacactgctcgaaaagcctcaaccccatccgcaatacggcacgcacacactggactactgcctcatttataacgtagcattgttggaatacctgaaagagacgggggacagggaaacagcgaatgacctgtggcctgttgttgtccgccagatagagttagcacttcgccagttttcaccggaatggatctatgacatggacaagaaacctcaatactggttggtattcgactggaaagacggatatgaccggcaggcttccatgcaaggactaacgattttcgccctacaacacagctacgaattggctaaaatgttaggcaaagaaaaggaggccggcgaatggccgacaatagccggcaagatgaagaaagctgcccgccaacatttctatgacaagaagcgaggagtaatggtcagcggcaaagacaaacaaatctcctatctgtcgcaagtttggatgatcctatccaacacactggacaaaaaagaaggggctaaggcaatggctaccgtcatgtccatgcccgacgcttgctatccgggctgcccctatgcttaccattatgtgatagaagcccttctgcaatgcggcatgccgcaagaagcacgcaaactgattaccgattattggggtagtatggtaaagcggggagccgataccttttgggaagtctatgacccgaacaatgattacctttccccctatggcttcttcgtaatcaatagctattgccatgcctggagttgcaccccgatctatttcatcaacaaatatccggagatattccaaaaataacctctttcatgccggttaaggaactgtatcaaaatacctatatgatttctcttaggcacggattacatggacttttttattctttcctcgtgtaacccgtgccaaaaaaacaaatagcaagcgaatttttattttgacctcatgaaatctttcaggaggtgtgtcgatcagcagtcagaatttcttcccatccttccaaaaccaaaagtcctcatcataaactcagatagccattcgcatagaacaacttacaataacaaagataaaacaagtatctccattactatttataacataaaacagccctatttataacaattcatcacaaacacattattattatacattaagacataatttacatatcaaaaatatcaaaacgtcgtatatttgcattgtaataaaacaaaaagacatatcaaacaaaataatagcgataaaaatgacagaaccaatcagatttacaaagatgcacggagccggaaacgactacatatacgtgaatacaatggcttttccggtccggaacccggaagagcttgccattaggttgagtgctccccataccgggatcggctcggacggactggttctgatcggttcatcaaaaatcgccgacttcagcatgcgtattttcaatgcggacggttccgaagccatgatgtgtggaaatgcctcccgttgtatcggcaaatatgtatatgacaaaagactgacgaacaaaaaaaacattacgctggaaacattatccggcatcaaggagttgcaactgaccacccggaaactttccggtccccacgaagaggtaaccgaagtgacggtcgacatgggccgtccggtaataggtgaaacagcccttgaaatagaagccggagactatttttatacgggaacggtcatctcgatggggaatctgcatcttgtcatttttgtcgaagatatcacgaatataaatctgccggtcatcggacctttattggaatgccatccgctgttcccgaaccggacgaatgtcgaatttgtccaggcgctaagtacagacgaagtacggatgaaggtttgggaacgcggttccggcattacgcaagcctgtgggaccggagcctgtgcgacagccgtagcaagcgcagtgcgcgggaaaaccggacgaaaaaccaaagtcgtcatggatggaggccctcttaccatccattgggatgaaagttccggacacgtctatatgactggcggggcggtcaaagtattcgagggggaactggaaatataaacacaacaaaaaactattgatagaatatggcactgattaatgaacatttcctgaagctgcaaaacaactacctgttctcggacatcgcaaagaaagtaaacagttttaaggttacacatcccaaaaagaaaattatccgcatgggtatcggcgatgtgacgcaaccgttagcccctgccgtcatcgaagccatgcacaaggcggtcgacgagatggcaagcaaggatacattccacggatacggccccgaacaaggctatctgttcctgatagatgccatcatcaagaacgattatgccagtcgcggcatcttcctcgaacccggagaagtgttcgtgagcgacggagccaaaagcgactgtggaaacatcggtgacatgcttcgtcacgacaacagtatcggtgtgacagacccggtctatccggtatatatcgactcgaacgtgatgagcggacggaccggtacgctggaaaacggcaaatggagcgacgtggtctacatcccctgcaccgaagccaataacttcgtgcccgatctgcccagccgccgcgtagacatcatttacctctgctatccgaacaacccgaccgggacaacgcttacgaaagaagaactgaagaaatgggtgaactatgcccttgccaatgattgcctgatcatgtacgactcggcttacgaggcctatatccaagatcccaatatcccccactctatctacgagatcaagggagcgaagaaggtggcgatcgagttccgcagcttctccaaaacagccggtttcacaggtgtgcgctgcggttacacgattgttccgaaagagttgaacgcctttaccctggcaggcgaacgggttccgctgaaccggatgtggaaccgccgtcagtgcacgaagttcaacggtacgagctacatcacccagcgaggagccgaagcagtctacagcccggaagggaaagagcaggtccggaaaacgatcgattattacatggccaacgcccgcatcatgcgggaaagcctccagagctgcggcctgcgggtgtatggcggcgaaaacgccccttacatctggctgaaaacaccggacggactctcttcttggaaattctttgacaaactgctttacgaagtcaatatagtagggactcccggtgtggggttcggacccggtggcgagggttttctccgtctcaccgctttcggagacagagacgacacgctggaagccatgagcaggctgaagaagtggttgctctaagctaacagtcgatgaattccaatccacaggttaatttggaaaattatcacatcaaatcattatatctatgtcaaagttaagattcagagtagtagaaacagccttcaagaaacgggctgcagaagtaccggctccggccgaacgtccatccgactatttcgggcagaacgtattcaaccgggcgaagatgttcaaatatcttcctgaaaaagcgtacgaacggatcacggactgcatcgacaacggcgctccgctcgaccgagaaacagccgacatcgtagctgccggcatgaagaagtgggcgatcggaatgggagccacccactacacgcattggttccatccgctgaccgaaggaacagccgagaagcatgatgctttcgtcgaacacgatggcaagggcggcatggtcgaagagttctctggcaagctactgatccagcaggaacccgacgcatccagttttccgaacggcggtatccggaacacattcgaggcacgtggctattccgcctgggacccctcctctcccgcttttatcgtaggtgacacactctgtatcccgactgttttcatcgcttataccggagaatcgctggactacaaagccccgctattgaaagccctcgaagccgttaacaaggctgccacagacgtctgccattacttcaatccagatgtaaagaaagtatacgcttacctgggctgggaacaggaatacttcctagtcgacgaaggactgtatgccgcacgtcccgacctgttgctgacaggccgtacgctgatgggacacgaaagttcgaagaaccagcaattggaagaccactacttcggcgccatcccgacccgtgtcatggaatttatgaaggagttggaaatcgagtcgctcaaattaggcattcctttgaaaacacgccacaatgaagtcgccccgaaccagttcgagctggctcccgtcttcgaagaatgcaacctggcgaacgaccataacctgcttgtaatggctctgatgcgcaagatcagccgcaaacatggcttccgtgtcctgctgcacgagaaaccgttcaaaggcataaatggttccggcaaacacaacaactggtcactgggaaccgacacaggcatcctgctgatggctccgggcaagacaccggaagaaaacctccgcttcatcaccttcatcgtcaatgtactgatggctgtctaccgccacaacggattactgaaagccagcatttcgagtgccaccaatgcccatcgtttaggagctaacgaagcacctcctgcaatcatctccagcttcctcggaacacagttgtcgaaagtcctggaacatctcgaaaaaagcgaaccggaagacctgatgctggcaggcaagcaaggcatgaagctcgacatcgcccgtatccccgaactgctgatcgacaataccgaccgtaaccgtacctcaccttttgccttcaccggcaaccgtttcgaatttcgtgccgtaggctccgaggccaactgcgcttccgccatgctcgccctgaatgctgccgtagccgaacagttgaagacattcaaaaccgaggtcgatgcaaaaattgccgatggcaaggaaacattcgccgccatcctcgaaatgctccgtaaagacatcaaggaatgcaaggcgatccatttcgacggcaacggctacagtgacgaatggaaagccgaagcggcccgtcgtggcctggactgcgaaacaagcgtgccggtgatcttcgacaactatctgaaagaaagcagcgtccggatgttcgaatccaccggcgtcatgacacgcaaggaactggaagcccgtaacgaagtcaaatgggaaacctatacgaagaaaatccagatcgaagctcgcgtactcggtgacctggcgatgaaccacatcatcccgaccgccaccagataccagacttccctgatcgacaacgtctacaagatgaaagacctcttccctgccgataaggcttccgccctttcgtcccgcaacctggagatcatcgaagacatcgccaaccgcaccaacttcatcaaagagaaggtcgatgaaatggtggaagcccgcaaggtcgctaacaagatcgaaagcgaacgcgagaaggcaatcgcctaccacgacaagatcgtcccaatgctggaagccatccgctaccacatcgacaaattagaactggttgtcgacgaccagatctggacattgccgaaatacagggaactactatttatcagatagttttttgttgattgttttgtgtttgcaaggggaacgtgctgtgaagtatggattcccttcttttttattacaaaggatttgcatacctttggagcataattcaataagaaaggagtttacgtcatgacggcaatggaattacaacaatggaaacagaactttatccgtgattatctggacgagatagacagtctggaagtgatggataagctggaaaaatatacaaaacggataataaataaaaagccggtggctctatcccctatcgctttcaatatagacgaagcaaatgctgaaatcgatattgccgaaaaagaattaagcgaaggaaaaggtatcaaagaaatggaaatgaatcaattctttgaaggatggaaaaagaaattaatatagtctggccccccgtgcacaagaacaagctaatttagccattacctaacaagtcgttttattatgggattgccgtcagaaccccgacaagctcaaaaaactataagacaaatataaacaaatatgaactacggatttgtaaaagttgccgccgccgtaccgcttgtacaggtagcggattgtttttataatatagaaaaaatagaaggactgatgcggcaagcatcggaaaaaggcgtgcagatcatcgctttcccggaactgtccgtcaccggctatacctgcctcgacctcttcgcccagcagacgttgctcgatggcgcagaagaggcactgctccagttggtcagcaacacggccgatctggatatcctgaccatcgtcggcgttccgctacggacggaaaaccggctgatcaatgccgccgttgtcttccaaaaaggagccatacggggtgtcgtccccaagacatatttgcccaactataaagagtttcaggaacaacgctggttcacatctgccacggaacttcgggaatcgacaatttccatcggggaagaagaatatccgatgggcagccacctgctgttccgttcgggacggctgactgccggcatcgagatatgcgaagacctctgggttcccgtcccccccagttccctgctggcgatggaaggagccaacatcatcttcaacctctccgccagcaacgagctgatcggcaagcacgcctacctgcgttcgctgatctgccagcaatccgcccgttgcatggcaggctatgtctacgcctcttccggcttcggcgaatcgagtaccgacctcgtctttgccggtaacgggatcatagccgagaacggcaacctgcttgccgaatctccccgtttcacgatggaagaacagcttgtcatcagcgagatcgacatagagactttgcagaacgaccggcaagtcaacaccagcttcatgtatggcacatccggtctaccgaaggaaaaggcacaggttgtagacttccaagtccggattccggacggattcagcctgacgcgtccggtcgatccgcatccgttcactccctccggagaggctttgaaggaacgctgtgaagaaatattccacatacaggtagccggccttgccaaacgactcgtccatgcacatgctcaaacggctgtcgtcggtatttcaggcgggctggactccaccctggctctgctcgtgaccgtcatgacgttcgacgttctgaagatgccacgggggcagatcatcggcatcacgatgcccggcttcggtacgaccgaccgcacctatactaacgcttgcgacctcatccgctccctcggcgtcacactgaaagagatcccgatcaaggaagcctgccttcaacatttccgcgacatcgaccatgatccgtccgtccatgacgtgacctacgaaaactgccaggcacgcgaacggacccaactgctgatggatgtcgccaaccagaagaacggcctcgtgatcggaaccggcgacctctccgaactggcactcggctgggcgacctacaacggcgaccatatgtcgatgtacggcgtgaacggcagcatcccgaaaacattggtcaaatacctggtcgaatgggttgccaatcacaaggtggacgatgcctcccgcctcaccttgctggatatcgtcgacacgccgatcagccccgaactgatcccggcagacgagaacggcaacatcaagcaaaagacagaggacttggtcggcccgtacgaactgcacgacttcttcctctaccatttcctgcgtttcggttcccatccgtccaaggtttatttcttagcgcaaaaagccttcgcaggcatctacgacaatgcaacggtcaagaaatggctctacaccttcttccgccgcttcttccaacaacaattcaaacgcagttgcctgccagacggccccaaggtcggctccgtcagcctctcaccacgtggtgactggcgtatgccgagcgatgcggtgtcgcgactctggttggaagagatagaacggatcaacatatagataccggaccgattcacccgacaaagatacgaaaccataaaaaagcaaagtcgattagagtcgattagagtcgattaaaatgactgctaaaacgatttttattggtattcattgttttattgatagctatgtctatttgcaaaaagcccgtaaagcaataggaatcattaaattagaacagcaaaaggacagatggtgtccttttgctgtgtccattccctatatataataactaagtattctcttataactaattataaaacgggacttttttcaatttttgaaaacgacaaaaggcgaaacttcaaaaaatcccgccaactcctaaaggaccggcatctcagccccccaatcaaaacaccggtgttttgaaaacgaatcaccggtgttttgaattcaaatcaccggtgattcgcaccataaagcagcagcctatatataaaagcagatcacaatccggaagaatcgatccatgaacatgaaaagattaatcgactctattcgactctaatcgactctaatcgactccgcttttttataatgccatatatttgcagggtaatcgattcacaaacgctctttgaaatatttacatatagccaaccgttcccacaaaaaaaggctaccggaacccgatagccttttaatggatatttcagttttcttattcagacaatgcaaatgccggctgacggtgaatccactgtccacgagtaaagtcggggaagtctaccaatgcgccgccacgggcgatagacatctcggacaaagcggaaatagcgctccatgcagcagcatcgtagcagtccataggagccggtttcttgttatggatagcgttgatcaagtcgaacatcatcacgtagtccataccaccgtgtccggcctgagcagcttcggcttcatgtttggaccacaatgtatggtcgaacttcttgaaccattcttccgaatcatcccaacggtgaggtttggattggttttcaacgtatacgtgatcgccatcgttcatccataaaccttcggttccctgaatgcggaatcccaaagagtaaggacggggggaattcgtatcatgcgtaacgataaccgtctgtccgtttgcacacttgatcatggaagtcacgatgtcacccaagttgaagcggacttttgccaacggatgattttcaccgccattgtccacgatgaacttatgcaaaccgcgagactgggttgccatagcagacaaggaaagaaaacggttaccacggttgatgtctaggcagtttgccaccggtccgattccatgcgtcggatagacatcgccgttacggcgaacagaatggttcgtacgccactgggcttctgcaaacgcatctttacccatgcgcaactcaccgcctttctggtaagtataatgtttaccatcattgaatttgacatcgcgcaaatcatgttcgtaaccgcaagtcgcatgcagcaattcaccgaacaggcctttgcggaccatgttcaacgcagccatgcagtcgcgacgatagcaaacgttttccatgatgttcagatggcttcccgtagcttccgatacgttgaccagatcccagcattcttccagcgtattggcggcagatacttccacaccgacataagggacaccggctttcatggctgcaaccgacatcggcacgtgccattcccacgggctggcgatgatgacacaatcgaattcttcgttgttcaacattttttcaaattcacgttcgctgcctgtatataccttcggagccggaacattgaacttggcgatatgatccagcgtacgctggatcggaccagcttggatatcgcagatagccacgatcttgtttccggggatagacaacacgttgttaatatgttcgtgacaacgagaacctgtaccgataaaaccgaagcgtaatttaccatcgtctttgccggcgggtttctttttcttctctgcactagtttctgttgtaaccgtagcagcagcattgctactcaatgcaagaccagccgtaccgattccggcagcggtcatctttttcaggaatgaacgacgagtgttttccatttttcaatttagaattttatgttaagtgggcaaatgtataacattccatgcatatatcaaaggagatagcccattattttgcagccgttctcttcttattccgccaaaagctgccatcccgtttgctaccgaacatattccggcgcttggactcttcttttatcgcttttttcttctcggctaccgcttcctttacctcgaccgtctcgaacatatggcctcctgcaaccggcacttctttaccgatcagcttctggatatctttcagatacggaacctcttccacatcgcaaaaggaaaaagcgatcccgctacggccggcacgaccggtacgaccgatacgatgcacataggtttcaggtacattcggcaaatcatagttgatgacatgcgaaagatggtcgacatcgataccgcgggaggcgatatcggtcgcgatcaagacacggagcgtatgatccttaaaactggataaggcacgctgacgggcactctgccctttgtttccatgaatggcttccgcaccgatcccggatttgttcaggacacgggcaaccttgtcggctccgtgcttcgtacgagtaaaaaccaagacggattccagtgagcggtcttccagcagattcttcaacaggttgatcttttccactttctcaacaaaatagacagactggtcgatcgtatcgacggttgaagaaacaggagtcacctccactttctcaggttcatgaaggatcgttccggctaggcgttcgatctccggcggcatcgttgcagagaagaacagggactggcgctttcggggcagtaaaggaaggatgcgtttgatgtcatggataaatcccatatccagcatccggtcggcttcgtccaaaacaaaatattccaatgtgtccaggcggataaaaccttgattgatcaaatccagcagacgcccgggagttgcgatcaatacgtctacaccccgttccaatgcatctgtctgcggcttctgccccacgccaccgaaaataacggtatgttttacgtgagtataacgcccgtatgccgtaaaactttcacctatctggatcgccaattcgcgtgtcggagtcaggatcaaggctttgatgcccggtttacgtcccctcgaaatccgctcttcgatcttttggatgatagggatggagaaagctgccgtcttacctgttccggtctgtgcgcaacctaataaatcagatccgtccaatactacgggaatggcttcggcttgtatgggagtgggagttgtgtacttttcttttttgagagcctttcgtatcggctcgattagttccaattgttcaaatgtcatataataagtatgagccgtcacggctcgttaaataaataatggtgacaaagatacacaaaaatccggcatctctgcaataatttgctatatttgcgtgctttttaaaaatattcagttctttttgattctcatgaaagaattattgtcactactcaaacggttcttcggatacacttcattccgccccttacaggccgaaatcatacagcgcaccttgcagaaagaagattcgctggtcctgatgcctacgggtggcggcaagtcgatctgtttccagcttccggcgatctatatgccgggaaccgccatcgtagtatctccccttatcgctctgatgaaagaccaggtcgaagggctgatcgccaatggcataccggctgctacgctcaacagcatgatgccggaggaagaacgccaccgggtacgacaactctgcatacagggaaaggtgaaactgctttacatctcccccgaagggatcattagcgaactacactggctcctgccccgcatcgacatttcgctgatcgccatcgatgaagcgcattgtatctcgcattggggacatgatttccgccccgaatatacccagttgtccgttctgaaagagaattttccgaaagtaccgatcatcgccctgacagctacggcagacaaaatcacccggacggacatcctgaatcaattgaaactgcgtgatcctaaaacattcatctcgtctttcgaccgcccgaacctgtcgctcactatccgccgcgggctgagcaaaaaggaaaagatcgcagcgatcgtccatttcatcaaccggcatcaccggcagagcggtatcatctactgcatgagccgtaacagtacggagtctttggtcgaagaactgtctgagtacagcatccgggcagtcgcctatcatgccgggctaagctccgacaaacgcgagaaagcacaggacgatttcatcaacgaccgtgttaatgtagtgtgtgcaacggtcgcattcgggatggggatagacaaaagcaatgtccgctggatcattcattataatatgccggcaagcatcgagaactactaccaggaaataggccgtgccggacgggacggaatgaaaagcgacacgcttctgttctattccgtgggcgacatcctgctccttcgccgttttgcagaggaaagcggacagaaagacgtcagtttacagaagttgaaccggatgcgcaggtattgcgaggcagacatctgccggcgtcgtatcttgctgagctatttcggagaagaaacggacaaggactgcgggaactgcgacgtctgcaagaaccctccccaacgtttcgacgggagcatcttggtacagaaagccctgagcggtatttttcgtaccgggcaaacagccaatatgcacctgctaatcgatatactccggggagccgaaaaggatgaactgaaggaaaaaggatacgacaagctaaaaacctatggtgttggcaaagacctcagctacaaagagtggaaagaatacttatatcagatgcttcagctcggttatattgaaatcgactatatgtcggccggtcacctaaaagtgactccattaggacgtaaagtccttttcggcgagcagcaggcgctcatgaccatttaccaaaagatcaaagattttgccctgccgaccaagaaaggcggctacaaataccgtccgatccgtccgatcgaatccacttccgtggatgaaacattgctcgactccctgcaacaactccgtaagcagattgccgaacgcgaacataccccggcttatatcctcttttcggatgacgccctcgaagatatggtccgtaagaaaccggttacgctcgacgagttcagcgaaatacgaggtgtcggacggctcaagctggacaaatacggcaaggtattcgtcgccctgatccgctttgtccttcgtttgcctaaaaaggaataaaaaaagaaaaacaaacaatcgttctattcttttgtttatatttatataatgaatagaatgacagatacaatgaaaacagttcccatactcttgttgctttgcctttccacactgagtttctgtacgacaaagccaggagagccgcaaggacctggtttacccggactagacactcccgttgcagaaacagtaccggaggcggcccctcccctcattgaaaccgttatagaaaaggaactgctttacgaccagcatacgttggccgatacttacccatacaaggatacaatgcgggaattccaatgggataagatccgtgccggtctccgtctgctcgattcgcttcgacagaaaccgtcccgttgggcgatctttcaaaactacaggaacaagaacggggaagccccgctggtccggaagtttcatcgcgatgcttacaagcgggtttccgacactttaggtatcgaacgttaccaatctgtcccgctatatctgccggaagatacactgactgccgaacgctatggccgtgacggtgctcttgtgaaattgcttgatgacagcaaccgccttttccgtatccaaacgatctatacaaacggggaatggctggttcccggaaaatatgtcaagtcgatagccgatagcgtcacgttcgacaaggccatattcgtcgacgtcaccaaccagaacatcgcaacactcgaacatgcaggttccaaatggttggtcagaagcatgaatccggccacaacagggcagcaccgtcctccatacgcacaggaaacgccattaggcatatttgtcgttcaggaaaagaaggcaaggatgatttacctcgtagacggcagcaaagagacaggcggattcgctccttatgccagccggttcaccaacggaggttatatccacggggtcccggtaaacgcgccacgcaagtcgctgatcgaatacagcccaacacttggaacgaccccacgctcccatatgtgcgtccggaatgcgacctctcacgccaagttcgtttatgattgggcacctgtaaatgagactattgttttcgtttttgattaaaagtcttatctttgtgcgacattattcaatcttatgttattgcgtatctgtttatacttgtttttattatttcttccggctaattatacgacaaccagaagttcgtctcccctgattccggctgatcccgcggcggccatgtcttcggtatgccgacagctctatgctgatatgcagctggatagtatggtggactataccgctttcgaacaggcgataaccggagcacaggcaatcgaacggcgtaacaaggatatcattaccctaatcgacttcacaaagccttccacggaagaacggctttacgtcctggatatccggcataagagactcctgttctcctctctcgtctcacacggaaaaaacagcggaggaaattacgccacttctttctccaacaaagtcaattcttacaaaagttcattgggatttttcgttacggaaaatacctatcagggcaaaaatggctattccttagtcctgaacggcttggaaaaagggatcaacgaccgggcaaaagaacgggcgatcgtagtacacggggcgaattattgcagcccgtctgttgccgtctcgacgggccgcttaggaagaagtttcggttgtcccgccctacccccgtcgcttgccaagccgatcattaacaccatcaaggacgggaccttactctacatctatgccaacgataaggagtatctgagtcaaagcacgatcttatcaaccggaagatcgatttccccgaactcgatcatcgcattgaacagcctgatacgggaatagcccggtaaatcctccggacggatatcacctgcaaccagctctccctgatccagcaacgaagccctcttcgtccctgccagtaacggtgcggagggagtgatccattgtttcctgttccagaatgccacgttgcaaatagaggtgtcggtcaacaaccctttccggacgaccaacacatcatcttctgtctcgcggcacgcgaacaagcggttcagcacactccgatctctgcttttataccgatagtcggcttcgtcatcgacaaccaaccgcaaagaggatactgggcggaagtgataggcggcatactccacgttccggatatccacatcatattcgacccgacacttcgtccgctcccgatagttcacggggcggatgtaatcgttcaaatcaagcacatcggtttgacgtagcacgttccgacgtgtctcattcatacgccggttatggtaggataagttatgaatccgcccgttctcgatccggattgtttcaataaatagggacatatactttctgcttcatttcattatattcgcttgtcaaatcactttgggaagtgattccccctccactcttaaagatcaacgagccatccgcctgctgttccaaaaagcggatcataacggcactgtccaggctattcccgtcaaaatagcccatgacacccgtataaaaccccctttcgtaggtctcggcttccgcgataatctccattgtcttctttttgggcgccccggtaatggaacctgccggaaggagccggaagaacaaatctcccacttcagcctgccaacctccggcaagacgaccccggatctccgaactgacctgcaacaaagccccctgatgtgtcggtagttcgtctatgtagcgataacgggtcaccatcacctcggtcgccaccatactgaggtcattgcggatcaggtcgacaatcgtagcatgttcggccgtttccttcggatcttctaatatccgcctgcgggcatccggcaatgtagcatcgatcgtccctttcatcggataggaatagatatgttcatcccgaatcttcacgaatatctcaggagagaaaacgacaaaacggtctttcatccagagcttataccgggcttccgaactgacaaaaacgtccttcaagctcagatcggtccgaacaggagtggcgcaagtcagattgaccaggtaggagtttccggcccggatatgtccaaccaccttatgaaacgagtcggcgtaggccgattgtgtgatagggaatgtttcccatcggatcgcagaagttcggttctcccgatcattcatacggcttgcagtcacaacattcgtcacaccgtccagattgtagagcaatgcctccgaatcgatctgatccggctcttccacaatcacctgctcttgcttgtaatcgatcacaaacaggaaaggccgcctttccgcacccaatcggttcatacgacagacggcctctatgcggttatagaatctcatatcagaaaacgttcggtcaaaccaccaaaagcgtcgatacggcgatctcggaagaaaggccaccaacggcggacattctcgctacgcgtcttgtcgatctccacaattcgtatttcttcatcattattggaaagttcggccaaaagttcaccctgcggaccagcgacgaaactgtttccccagaactgaatgccattcgtttgtctggacggatcggcctcgtgtcctacccggtttaccgtaacgaccggaagaccattggctacggcatgcccccgctgaacagttacccacgctcctaactggcgttttttctcttcctccgtgtcactgctttcccaaccgatagctgtcggataaatcagcagttccgctcctttcatcgccatcaggcgggctgcttcgggataccactgatcccaacaaaccaatacacccaatttaccaacagaagtctcgatcggctcaaatccgagatcaccgggagtaaaatagaacttctcataataggccggatcatccggaatatgcattttacgatattttccggcaatagcgccgtctttctcaataacgacagccgtattatgatacagaccgggagctcgtttctcaaacaaagaaagtaccagtacgatccccagttcctttgccaacgctccgaagccctctgtagaaggtcctggaatcggttcagcctgatcgaacacttcggtattctccgtctggcaaaaataaagcccgttatgcaactcctgcaaaacgaccaattcagctccttgcaaagcacaagcccgaatattttgtttcagtttctcaatattagcagcccgatcactgctattcgcctgctgcaccagccctaacttcatgatttatgatttataatttatgatttagatttgaaacctcaattgtcaattgacacgactccctccgggtactgcatcgtcacacaatgtagcgaaccatgttgtttaatcaacggcaagcaattgattcctataatctcacgctccggaaaagcctgttgcaaagctttcttcgccagttcgtccttcggagatttataatagggtaacaacacagccccgttgataatcaaaaaattggcataagtggcaggaagacgttctccctcccattccacagggtccgccatcggcaaggcgattaaccggtaaggtttgccgtcagcctgtctgaaagcctgtaactcctgttccatcgcttgcagctcctcgaaatgttcatccgactcatccttgcactgcacgtacgcaatcgtatcttcgctacagaaccgtgccagcgtgtcgatatggctgtccgtatcatcaccggcaagataaccattttccagccataagatgcgttcaaagccgaagacatccttcagataggcttccaactcttccttttgcagatattcgttccgattctgagacgaaagacattcgaccgtcgtcaacagtgttcccttgccatccgattcgatactgccgccttccaagacaaacggttgcatattgatgacctgaaccccgccggcaaatgttccctgtaccgacaggttacgcgtaaccaggttatccagattcgccgcgaacttcatcccccacccgttgaacacaaagtcatacacgactggttctccctggtcgaatacagtaataccgccatgatcacgtgcccaggtatcattcgtcgccatctccctgaaaatgatccggctgtcatccacatcgcccaattgtctgcgtacttcctgttcgtccggacagacaatcaagagcttctcatgtttgatcacctccttggcaatcgatacaaaacaaggaatcacctcgtctaatataggcgcccaatccgtttcatcatgcggccatgtcaactggacggcactttgcggataccattccgccggtaatatgattttattttccatctgcgtttaataaaatatgcgattgtattgcggcacaaatataggcttattttccatcattcttaatacaaagattctatcacctctgtcaacttgctgtttttcttccacgtctcaagcaaacaaagaagcggtgcgtatgtcaccttcggccagttattgactgtttgaagttccgcaaaaacttccaataaccgctttaaatcctttaccggattttccggcaggcaagacaagaaagagacaaacagcacagacagttctttgttatgaaaagatgatctatttatcaacatttcgacaaccaaacctgaaactctctgcgcaggagcccattccaacgcttggatcttccccaacacccgacctaatgccacattgtctatcaggtctttttccacaagttcgccccaaagattcgccgcacacaaacgaataggacgatcaatgctcaacaggcacaccgccaggtatgtcaaagccatcccccctctccactccaaatcaagttcgcgcagggtatcaagagcaaccaggttaagccttgctagttccaaatcgttccaataagcatcccttacgcgatcccgcaccaataaagccaaccaaatccgaggtgcattcggagaaagcaacaaaaatctcttcaggtccttctcccgcaaaggaaccttccaaaaagtctccaccaaaagcggaatacgggaacaaggacgataagccatatataaggcataacctccaaacctccactttatcgcaacattcttacttaccggcggaatcaactgcaagatacgatcgactttcccaaacggcttttcgaaagtaaacacatcgcatggaatatctcccgtcagataggcccggttcacagcagaataaggaaaatccttgaactcgtcatagacggtatcaggacttttgaccaaagcggcggtcatccagacagcctgaaacgtaaaaggaccattagggcgtgcttccggcttgaacaagaaaagcaatagctcgcgatattcgcccgccaactcttgttcggttaaccggacagcctcttccgtatcatccaatgccacacgcgaaagtgcgatttgaaagtccagactgtccggtttgattctctttttctgatatgcagacaaccgagagacaagcacggacggatcgatccaagccggacggtgggtcggtgtcgatagcaaaggcagcgtattataatcttttatccggttaaaagccaattttacaagatccagatagggtttatagtcctgaaatgattgttgtttcgagcttttgacacgtctttccgatccggtaagcatttgagcataatcaagaagaaaagacgctgccaacacatccaattctcctaccccgtcttttccttcctccacaacggtacgggccatttcgaaaaccggaaccatacgttccacatcctcctgctttacaaacggatgcatacgggacaaagaggccaaaagtaaatcgatatggaaactctcttcgttatccatcgaacggcccatcagagaaaccagcccatccatatccgtgacatccggaatacgcatttcttcccgaatgaagggttgtttttctattctttccatactacttcaatattgtgcgatacaaatatacggagaaaaatacacccatcagacaaagtatccatttacccttgtgttttccggtattccatgggtgtcatgccatatttgtctctaaaaatgcgctggtaggttcgcacattgccaaaaccggaatcgatagcgacagcctcaatcgtataatgcttgaaatctttcagcagcacaagcgaataatcgagtctcagccgattgatgtatccgttgaaattttcgcctgtgaaagtctgcaataacggagagatacgatttttcccaacaggtgtccatcaagacgatgatcctacgccgacggttgttgaagaacccgattggaaattggaattggtggaaaacgatcctgaaccggaatgggaaatgccggaaagcggaatctataaggcttccgaatctttccccttcattgatgaaggagtgaaaggcaccgaagaagagccgttcacgatatctttacaacctgttgtaaattgacactaaactccaataaaaagaaggtgtgtcgtaatacccgatgcgccttctttttttcgttgactataaaaatcggctcatttttttaagctgcgatattttgaggatttcttcgatttatgtgttcgcagcatctaaatatagctactgtaagctcataaaacagtccagtcagccaatccataccttctttagccatttttgcacatatcttttttatattgaaggcaatggcaaagaaggaaaagtccatgaagaccttgtcctttccaaaatggcggaaacgtttgtaattcatattgtttttcatttgtccgaacacggcttccggttctatgcatctctgtcctctgtgtttcagcccttcctcggagcagagctgctctttggctttttgcctgtattttctgagcctgtgattcagttctatcgtcctgtttccttttgctttaaaacaacggcatcttagcggacagccttcacatctgacggctctgtacctggcattttcgctgacatatccggatgcggttttcacatgtctagtacctatcctccgcatcctttgtcccatagggcagatgcaaaagtcatgttcttcattgtagtagaagttttctgccttgaacggatccggtttgaatctcggccgctgctccatgtggaaatagttatatttgacgtaagcttccatgccgttctctgacatgaagcggtagttctcctcggaaccatagccggaatcggcaaccaccgtatgagccatccggtcatacctgtttgaaaaagattgcaggaaagggatcatggtcagtgtatccgtagggttcgggaagagtgcaaaatcggtgatgaactggttctcggtgccgatctgaaggttgtaaccgggcttcgtctgcccgttacgcatggcatcctccttcattctcatgaaagttgcgtccttgtccgtcttggaataggaattcctctcttgcagcgtgtccagatgactgtcgtattcctggagtttgtccctatgttcttccagctccttcagctgtttgcgtctctttttcagctcagtcttttcctccttggtggaaggctcgggaacctgttccagcacatgacgtaattctcccgccatttcggtcagcatggccggagtgaactcaacctcctcattactttccgaatacttttcttgggcgatgacatcgtctatctgccctagcaggacatgtatcttcttcatcaggcgttcacggttccgtaagcgtctccgcgatgctaccattgttcttcaaacaagagtatttagctttgtcatcaaaaaaagatgaaagcagaaactcgttttccccgtacagtagaagcctacaaggcacatttgcatgaagatcgccctcattacgacagttttcaaaccttttgccgtaaacaaggggtacgttataaaggagtgatgcaatggatgcatcgtcataatcgaagcgtaggaagtttacgtttggaagtattattggaaaaaaacggtaatgacagtaacttgaaaagttcacttatagaagtgtcagggcaaagctttccgatcaagaactcctgcatatcctcacgcaatattcctttggaccaatatatcaaaggtgcgatcctctctttccctgacggtgtatccattagtatccgcgagaccaccccttcggccttaatgaagctttttgaattatacacccaagtaacaggcaatccaaatgtttagtctgaacgaatccctgcattattatctttacccttactatatcaatatggggtgtggaatagagattttatccgaactggttcgcaatacaaagacaggaaacccactcagcggagatgtctatttgttctgtggtaaaaaacgggacatgatcaaactgttgcgctggcaggaagacggatttattttatatcagaagcgtttagaggacgggacctttgaactcccccgttttaatccccgtgaggactggaataagatcgaatggaaaacgttcatgatgatcatgtcaggcatctctctgaattcagtgaagtacaggaaacgccttcgtttgtagtccggtctattgatttgtagggcgccgctttataaataaaagcataaatattttgccgccggaagaactatccgtatctttaaggcatggattacaagcggattgccctcttattggaagaccagttgaaattggctgcgcagcgggaagaggagttgttgaaagtgatcgcagatcagaatgaacagctcaatatcctgactgcggaagtcaaatccttaaacagttccatcctctcgttggagaaagccctgttggaaaagaatgcatcccttgaaggccagcaaagtaaagtccgcatattgggaaagatggtatcgggcaagaaatccgaacaggtctctgtccccgataaaggaacgacaatcatagccaaagtaaaacccagtctgaaagaaagagggaacaacggagccagacgcaaagaatattttaatctggaaacctgccatcatgatatctatccggatgcagcagagttcaaagtggaagaaggcaaaaaaatacgtacgacagattgcatccgctacgaatttattcctccccgttttatcaagcatatctatcaccagcactattatgcctgtaaaggcactgtttatgccggaagtctgccagctgtccccttgttgaactctaattatgatgcatccttcatcgccggtatcctgcagttgcgctatatctactccatgccagtcgaacgtatcatcaaactcttcgcagagcatggctttgagatgaataaagccacggctcatggactgattaaaaaagcggccggtctgtttgacctggttgaagatgttctcaaagagactgtcctctcggacaattatctgagtatggacgagagctattataccgttcttaccagtgatacaaacaactcatccggcaaatccacagccaaaggatatatttgggcagcactggctaatcatctaaaactggtacatttcttttacgaaaacggttcacgttccagaaaggtcctgaccggttatctcagggaagactaccggggagctatacaaagtgacggattaggaaattacaagataatagaaaaagaggcctatccggatgccatccgcctatcctgtttccaacattgcaaacgcaagttcctgaatataacaggaaacaaggatgctgaaaaaatcgtacgaatcatcaatcgcctttaccaaaatgagcaccgcattcccccggactggacagcccgccagatactggactatagaaataaatatgctccccctatcctcaaagaattaaaagaggaactgataaatataaaaaacaaaaagtcgactttacccaaaagtgaattaagtaaggcgattaactatacgttaaacgaatatgatgctttatgcaattatatccgcagtgcagactatgctccggacaataatgcgattgaaagactaatgcgatatattagcttaagccgcagaaactccttattctgtgggagtcatcagggggctaaaagggctgcactgatctactcactggcttgttcgtgcaggctcaacaacattaactcatttgagtattttaaagatttgcttactaagctcattgatataaatcccaatacagatcacgagactataagaaatttactcccccataaatggcaaaggtagcatcgcggagacgattacacggttccgctcaaccgtttttcgccaaacgaaagtgtacttgttggctttggattcaatctttgtcccgtcaatgtattccacattcaaactgataaatcctttggaagagagaaggagtacggtttgggtaaacacctcgttgatttccttcttcacccgattgcggaaacggttgatggtaatgaaatccggtttctcatatccggcaagccagatataatgaatgtcacgatgaaggagcttttcgattttccggcaggagtagacgttgttcatgtaggcatacagaatgaccttgagcatcatcttgggatggtaagggctgcggccgcattccttatatagcttcctgaaactttcaagattcaggccctcaaccagggcgtcaaccatgcgcaccggatcgttatctgcaatatcctcatctattctttgaggaaaaagcactgtttggttgggattgtaaggacgaaaatgtatctttgccatagtataaattcttatgcctaaagatacaaaatcttcaggttataacaaagccccagcttgtgaaagtcggggctttgggtataaaaaagaaggtgcgaattttgagagggcactgaaaaagtttccttgcagctttttaaagaattaaatctgcacatagcctgtatattatttggctatgtgcagattttttgtaccttaatgccataatatttaaggtccatgctatcaccacaacaagaacttccgctcagtgaatatagttcactctacgatatagttgtcccccaagacaatcttcttcgccgcattaatgatcttgtagatttcacttttgtctatcaggaacttgccaataagtattgcaaggataatggtcgaacagcagaatcccctattcgcatgttcaagtatcttctgctgaagaccatatacgatatttccgacgtagatgtcgtagagcgttcccgttatgatatgtcctttaagtatttccttggcatggctccagaggaagacgttattaatgccagcagtctttgtaagttccgcaagttacggctggaagacatggatcttatgaacctgctaatccagaagagcgtagaaatagcgatagagaaaggcatcataaaatcaaggacaattattgtagatgctactcatacagaagccaggtctaacccgtactccccgatagagattctgcgactccgttcaaagcaactccgtaaggtactttatgccatggataataatatcacgcaaaccctgccgtctaagaataaagaggatgatcttgcgcatgagttggattataccaaagaccttctgaaacttatcacttcagatgccagtctttcagaagtgcctgcagtaaagcagcgacttaacatgctcaaggaaacgctttcagatatagaggatcactatacgacctcaaaggatgcagatgcccgcattggtcataaaacagaggacagttcgtttttcggatataagactcacattgcaatgagtgatgagcgtatcataacagccgctactgttacttctggcgaaaagggcgatgggcctcagttgaaagagcttgtggagcaaagcagaaaaaacggaatggaagtgaacactgtcattggtgataccgcatactccggatcggaaaaccttagactggcagaagatgaagagaagggatttactttggtatcaaaattacatccggccataagtcatggactcaggaaagatgaagacaagtttgattataacaaggatgcaggcatgtttgtttgtcctgccggtcatatggcaatcagaaaagcaaggcaggggaaaaaggatgggaaatggaatcaatccatgacttatttctttgatatagagaaatgcaagacttgttcacgaagagaaggatgctaaaaggagggggctaaaagcaagacctatagtataccgtaatcgtctccgcgatgctacctttgccatttatgggggagtaaatttcttatagtctcgtgatctgtattgggatttatatcaatgagcttagtaagcaaatctttaaaatactcaaatgagttaatgttgttgagcctgcacgaacaagccagtgagtagatcagtgcagcccttttagccccctgatgactcccacagaataaggagtttctgcggcttaagctaatatatcgcattagtctttcaatcgcattattgtccggagcatagtctgcactgcggatataattgcataaagcatcatattcgtttaacgtatagttaatcgccttacttaattcacttttgggtaaagtcgactttttgttttttatatttatcagttcctcttttaattctttgaggatagggggagcatatttatttctatagtccagtatctggcgggctgtccagtccgggggaatgcggtgctcattttggtaaaggcgattgatgattcgtacgattttttcagcatccttgtttcctgttatattcaggaacttgcgtttgcaatgttggaaacaggataggcggatggcatccggataggcctctttttctattatcttgtaatttcctaatccgtcactttgtatagctccccggtagtcttccctgagataaccggtcaggacctttctggaacgtgaaccgttttcgtaaaagaaatgtaccagttttagatgattagccagtgctgcccaaatatatcctttggctgtggatttgccggatgagttgtttgtatcactggtaagaacggtataatagctctcgtccatactcagataattgtccgagaggacagtctctttgagaacatcttcaaccaggtcaaacagaccggccgcttttttaatcagtccatgagccgtggctttattcatctcaaagccatgctctgcgaagagtttgatgatacgttcgactggcatggagtagatatagcgcaactgcaggataccggcgatgaaggatgcatcataattagagttcaacaaggggacagctggcagacttccggcataaacagtgcctttacaggcataatagtgctggtgatagatatgcttgataaaacggggaggaataaattcgtagcggatgcaatctgtcgtacgtatttttttgccttcttccactttgaactctgctgcatccggatagatatcatgatggcaggtttccagattaaaatattctttgcgtctggctccgttgttccctctttctttcagactgggttttactttggctatgattgtcgttcctttatcggggacagagacctgttcggatttcttgcccgataccatctttcccaatatgcggactttactttgctggccttcaagggatgcattcttttccaacagggctttctccaacgagaggatggaactgtttaaggatttgacttccgcagtcaggatattgagctgttcattctgatctgcgatcactttcaacaactcctcttcccgctgcgcagccaatttcaactggtcttccaataagagggcaatccgcttgtaatccatgccttaaagatacggatagttcttccggcggcaaaatatttatgcttttatttataaagcggcgccctacaaatcaatagaccggactacaaacgaaggcgtttcctgtacttcactgaattcagagagatgcctgacatgatcatcatgaacgttttccattcgatcttattccagtcctcacggggattaaaacgggggagttcaaaggtcccgtcctctaaacgcttctgatataaaataaatccgtcttcctgccagcgcaacagtttgatcatgtcccgttttttaccacagaacaaatagacatctccgctgagtgggtttcctgtctttgtattgcgaaccagttcggataaaatctctattccacaccccatattgatatagtaagggtaaagataataatgcagggattcgttcagactaaacatttggattgcctgttacttgggtgtataattcaaaaagcttcattaaggccgaaggggtggtctcgcggatactaatggatacaccgtcagggaaagagaggatcgcacctttgatatattggtccaaaggaatattgcgtgaggatatgcaggagttcttgatcggaaagctttgccctgacacttctataagtgaacttttcaagttactgtcattaccgtttttttccaataatacttccaaacgtaaacttcctacgcttcgattatgacgatgcatccattgcatcactcctttataacgtaccccttgtttacggcaaaaggtttgaaaactgtcgtaatgagggcgatcttcatgcaaatgtgccttgtaggcttctactgtacggggaaaacgagtttctgctttcatctttttttgatgacaaagctaaatactcttgtttgaagaacaatggtagcatcgcggagacgcttacagtatacctatcaggaatgaagaacagaaaaggcagcttggattccagaaatcacaagaatttaaagatatagctcgtcaaagatacaagattgaggcaaagaatgcagaattaaagcaggtatacggttatgataaggcactgtcgtatgggctggatggtatgcagatgcaaggtgctatgaccatctttgccgcaaatatcaagagaatattgaaactaagctaaaaaacacttataaaaattacccacgtataatatgatggccttactgactatacaaggccgaatataaactcctatcaagatatataaaagcagattgcaaaaccgatataaaggctaatacaatctgctttcgtctttttaaagattgggattaaatcttaagaggatacctttttcagtgccctcccttttcagacaccttctttccaaacgcaacgaataaattattaattacttacactcttattatttcttacagtcgcaagaagagtaagccactaacatccaaaccaatttttcctgttccttcaggtaatcgctcatcaatgctactgtcgcctcatctccggattcggaagccaaagaaagtaatttacgttcttcggcaataaactggccgtaagtgtccagaacgttttccaacgcttcgtctgcacaagatacgcccgacacctcctttactttggcaactttcagatattcactgaatttgttaaccggaacaccacctaacatcaggatacgctcagccagttcatctaccttttcagcggcatcgttatacatatcttcgaacttgctgtggagaacaaagaaaccgtgtcccttaatgttccaatggaaaccgcgaaggtttgtatagaatacctgataatcggctaataactgttgtaatgcttcaactactttacctgcagcaactgcatccaaatggatataatctaatgtcttcataatactttactttttaattgttatacttttcgtttttcttgtactgcaaagatacatcagatataagtacctgtcaaacagataatttttatacacgaatagatatactctatcacacttccggcagaatggattaccagtccgataccgaagacacagcattcgtcggaatgacacttttacacaaatattccatacctgcctgctcttgctttcaaaacatatatgctttgaacacgaaacatatatgttttgaaatcgaatcatatatgtttcgcattgcatttcatgattttttcctaccttcgtaaaaattatcaatacagagtccgtaacaacaaacaaagaatattatgaatatacaacaactcgaatacatcctggctgtagacacataccgccattttgccaaagctgcagaacattgccgcgtaactcaaccgacattaagcatgatgatccagaaactggaagatgaactgggcgtgaaacttttcgaccgcaatatccagccggtctgccctacccctgccggccgtaaggtgatcgatcaggcacgtgtagtcctctaccaaacttctctgattaaagatatcgtaaacgaagaagagcaatctttgaaaggaacgttccgcctcgccgtgttaccgacgattgctccttatctgcttccccgctttttccagcaagtatcggaaaagcatcctgatctggatatccgcattctggaaatgcaaacggctcctacaacgaaagccctccttaacggcgaaatagatgctgccatcatcgcgaaccaaccaacggaggtgcagctacagggagacatcctatactacgaacagttttatgcttacgtagcccgtaacgaaagcgtgttcaagaaagagatggtccgctccgccgatatcagcgacgaacgtctttggttgctggatgaaggacattgtttccgcgatcagctgatgcgtttttgccaaatggaaaaggtcaaactccgtcaggcagcctaccgtctgggaagtctggagacttttatgcgtatggttgaaagcggcaacggcgtcacttttattccggaactggctacctatcagttaagcgaacagcaaaaagaactggtacgcccgtttgccatccccaaaccggcacgtgaaatcgtctgggtaacccgcaaagattttatccggcattcggtcgccggtattctgatcgaaagcatccgaaaatctgttccaaaagaaatgcgtacactgcaagcggggttgcgagtggtctgaaacggaattgtctttcataggacagcaaaatttggaaagccggcaatttaaacacatgaccgattcatgtctatctggcaaaaaaacacccctgacgaaataaatatttcggatgcgatgaaaaaaaatatcactttatgcttgtagtttccaaaaaagcgttacttttgctgcgtatttaaaaacaaagagacaaaatgaatcgatttagctttacatattacttttattacttttactttagcagagtgaaggcaggagtttgtatgtaaagcattgatgaatgaatgtatatatcaataacaaaatatgaagtcctgccggtttcggtgggacttttttgttattgaaaattgagaattgaaaaataatagataaagagaagatgaaaaagaaagtagcaatccagggaatagccggttcgtatcacgatatagccgcccgtaattatttcgaaggtgaagagattgaaattatcggttgcaacacattcagagatgttatttcgaccatcaagaaagatccttccattctgggaatgatggcgatcgaaaatacaattgcaggcagcttgttgcagaaccatgagttgatccgtgaaagcggtttgcaagttatcggcgaatacaaactgcgcatatcccactcgctggttgcacttccagggaccaatatccacgatgtcaaagaagtcaactctcacccgatcgccctaatgcaatgtaccgatttcctcgatacgctacctaatgcaaaagtggtcgagaaggaagataccgccatgagcgcccggtggatttcggaaaaccaactgaagggacacgccgccatctgtgggaaactggccgcccaaatctacaacatggaagtccttgccgaagggatcgagacaaacaaacgaaacttcacccgctttttggcaatagccgaccgatggacggcagacgagatgctcaaaggtgaagacaaaaacaaagcgtcggtcgttttcgctctcccccacacagccggcagcctctccaaagttctctccgtcctttccttctacgacatgaatctttctaaaatacaatccttgccaatcatcggccgcgaatgggaatatctgttctatatcaatctgacatttacggactacctgcgctacaaacaggcattggatgctatcagaccgttgacaaaagacttaaaaatattaggtgaatatgcagaaggaaaacaaagtgtgtaacattacacccgctaaccgcgtaggtagcgtacaagagtactacttttccaggaaactgaaagaagtagccgaaatgaacgccgctggtaaaaatgtgatcaacctcggcgttggcagtcccgaccttcccccttcggaacggacaatcgagacattgtgtgaacatgcccgtcagccgaacgaacatggttatcagccgtatgtaggtattcctgaactgcgtaaaggattcgccgattggtataagaaatggtatgacgtggatcttgaccccaaaacggaaattcaaccgttgatcggttccaaagaaggaatcctgcacatatcgctggcattcctgaatccgggtgagggcgttttggttcccaatcccggctatccgacctacagttcggtaagcaaattagtcgaagccaatctgatctcttatgaactgaaagaggaactgggttggcagccggacttcgatgagttggaaaagatggatttatcgaatgtcaaattgatgtggaccaactaccccaatatgccgacaggagccaacgccagtatggaactatacgaaaagctggtcgctttcggaaagaagcacgggattatcatctgcaacgacaacccatacagcttcattctgaacgagtatccatcgagcatcctgtccgtaccgggagccaaagacatctgtatagaaatgaactccatgagtaaggcgcacaatatgcctggctggcgtatggcgatgctcgcttccaatgcccaattcgtacagtgggtcctgagagtaaaaagcaatatcgactccggacagttcaagccgatgcaatatgcggccgtcgaagcattgagcgcaccgaaggaatggtacgacaatatgaaccaggtataccgcagtcgccgtaatctcgccggacagatcatgcgcacgttaggatgcgaatatgacgaaaagcaggtaggtatgttcctctgggggaaaatccccgccggagcaaaaggtagcgaagcgatagccgacagggtcttgtatgaagccaatgtattcctgacgccgggatttatcttcggtagccagggcgaacgttacatccgcatctcgctctgctgtaaaaacgaaacattggaagaggccctgaagagagtgaaaaagatttatgatttataatttatggtttatacgtcaccatcaaatcataatctcataaatcacaaattataaatcataaattataaatcatcatacagtcatggaaatggaattagaatcaatcatgttacccggtatagatccgcagcgccctattgtaatcgccggtccgtgtagcgcagagacagaagagcaggtaatggaaacagcaaaagggatcgccgacaaaggcatcaagttgttccgcgcaggaatctggaaacctcgtactaaaccgggtggattcgaaggaatcggagcggaaggcttgcaatggttgaaacgagtaaaaaaggaaacaggcatgtacgttgccaccgaagtggcaacgaaagatcatgtgttcgaagcattaaaagcagggatcgacgtgctgtggatcggtgcccgtacaacggttaacccgttcgccgtacaggaaattgcagatgcattgaaaggcgtggatgttccggttctgatcaagaacccggttaatccggatttggagttgtggatcggcgctttccaacgtctttatggagccggtatccgtcgcttgggtgccatccaccgcggtttcagctcttacgataagaagatgtaccgcaacctcccactctggcatattcctatcgagcttcgccgccgtatgccaaacctaccgatcttctgcgatccaagccatatcggaggcaaacgtgaactggtcgctcctctttgccagcaggcgatggacttgagtttcgacggtttgatcatcgaatcacattgtaacccagattgcgcctggagcgacgcttcacagcagatcactccggatgtattagattacgttctgaatttattggttatccgcgactccaaccagacaacggaaaacttgactgaactccgccgccagatcgacggtattgacgaacaattattggaacttctggctaaacgtatgcgtatctcccgcgagatcggcgtgtacaaaaaagagcacaatatgccaatcctgcaatcaccgcgctacagcgagattctggaaaagcgttccaatatgggtgaacagatggatttgagtacggactttgtaaaagaaatcttgaaagaaatccatgaagaatccgtccgccagcagatgatcatcatgaatgaacaataatagtttgctaatgtgccaattaaagagaatgctccattggcacattagtacattaaacaattactgataatgaaaatactgatattgggtgcagggaagatgggatctttcttcaccgatttacttagttttgaacatgaagtggccgtacttgagagtgatccgaaacgaatgcgtttcatctataatgctctccgcctgcaaaagccggaagaagttgccgaattcaaacccgaattagtcattaactgcgtgacgctaagctatacgatcgaagcattcaagagtgtcatgccctacctgcaaccatactgtatcatctcggatatcgcatcggtcaagacgcacctgaaagaattttacgagacatgtaactttccgtatgtttctacccatccgatgttcggcccgacatttgccaacttgggacaactggaaaaagaaaatacgatcatcatctccgaaggggatcatttgggaaagattttcttcaaagacatctattcgagtctacgtttgcatatctgtgaatatacattcgaggaacacgacaaggttgtggcttactcgctgggaatcccgttcgcttccacgatggtgttcgctgccacgatgaagcatcaggatgcgccgggtacgacgttcaaacgtcatatgaaaatcgcccgcggtctgctttccgaagacgactacctgttgacagaaatccttttcaacccgcgcactcctcatcagatcgcacgtatacaggaagaactggatatcttacaaagaatcatcaaggacaaagattcggaaggaatgaaagaatacctgacaaaaatcaggaagaatatcgaataatacagtacattttgacacaccgctttccaagatacaatctggtaacaacaaatcgttccacagctgtgagtcgtccagctcacacttgtggaacaacttatttaatgacttcataccataaaacaaacgatcatgaacaacatcatccactttatggcaagactatcattgctatattccctgttatggagcatttccattcacgcttatgcacacagccgagataccgacccaaactccacatatccgacaccggaccgtcttttccacattgcacgtagcttgaaccgcaacctcgtctgttatgatgccaaccaaaccaatggcaaactagacaccaaagaacccataaaagtttactggctgaaccgagaaatggaaccgggaaaaactaacggactaagtttcatacaaaaaaagatggcctacggttacaaagtggtttcaatagcagaacatacttgcacgattaccctaacggcttatccggaaaagaaactgacgatctgtagggagggagatcacttcgtctgccatgtcaagatagacaaccggcaggctatcctacaatctttgtatgtcaaggccagccccaacaatccgctaaatgtggaatacgtggaactgcaaggcataacaaccgatactggcgtccctgttacggaaaaggtcagcaaataaaaaagaaatacggttgctatcaactacacaggtctttgaacttttttgcaactattttgcaactaaaaaatgtaaaaaccgcttgaaaagcgtatttttgtccttgtatttcaaaaaagagtgttttacggatgaaggtatgtatagctgaaaagcccagtgtagcacgcgaaattgcagaagttctcggggcaaccaaaaagatgaacgggtatattgaaggaaacgggtatcaggtaacctggactttcggacatctgtgcactctcaaagagcccaatgattattcagagaactggaaacgatggagtctagcttccctcccaatgatcccgcctcgattcgggatcaagctgatcagcaatccgacatacgaacagcaattcaaaacaatcgaagaactgatgcagaatgccgaaatggttatcaactgcggagatgccggccaggaaggagaactgatccagcgttgggtgatgcaaaaggctggctgtaaatgcccggtctaccgcctatggatatcttcgttgacagaagaagcgatccgcgaaggttttcaacatttgaaagaacagtccgacttcaccaagttatacgaagccggtctttcccgcgccatcggtgactggctgttaggaatgaacgcaacgcgcctttatacgctccgctacggacaaaatcggcaagtgctttccatcggacgagtacagacacctacccttgcactcatcgtaaaccgacaagccgaaatagacaactttaagccggaaccttattgggaactgaaaacagtttaccgaaacactactttctcggttaccaaaggcaaattcacgaagaaagaggaaggggaagctttcctggaaatagtccggcaaaaagaattcaccgtcaccgacatatcagaaaagaaagggaaggaatatgctccccgccttttcgacctgacttcgttgcaggtggaatgtaataagaaatttgctttcacggctgacgatacattgaagctgatccagtcgctatacgaaaagaaagtgacaacctacccgcgtgtcgacaccactttcctaagtgacgatatctatcctaaagttcccaacacacttaacggcctggttgactatatcgacctgacagcctcgctgctgaaggcgaaaatacggaaagacaaacgtgtattcgacaattcgaaggtgacggatcaccatgccatcatcccgaccggtgtaccagcacgcaacctaacggacaacgaacggaaggtgtacgacctggtggtccgccgtttcatcgcagctttttacccagactgcgaaatctcgactactacggtattgggtaaagtcgacaaagtagatttcaaggtaacaggcaaacagatactgaaaccgggatggcgcgttgtgttcggagcagagcagaaagactcggacgccgaaccgtcagatgaagaaggcgtactgccggatttcgtaaaaggagaaagtggcccccacaaaccgacattaggcgaaaaatggacacagccgcccaaaccctacaccgaagcgacattgctccgcgccatggaaacagccggtaaacttgtggacaatgacgaattgagagacgcattgaaggaaaacggtataggccgtccttccacccgcgccgccatcatcgagactttattcaaacgcaattatatccgcaaggaacgcaagaacctgtttcctacagctaccggtgtggaactcatcgacacgatacaggaagagctgctgaaaagcgccgaactgaccggtctttgggaaaagaaactacgacaaatcgaacggggcacctacgaagcccgtacttttttggaagagcttaagctgatggtccatcaagtagtgatcaacgtcctctccgaccagaccggacgcaccatcacaatcgagcaggctgctccggagaagccccaagccgaaaaggagccgaaagggaaaaaaacgcgcaaaccgcgtgccaagaaggaaaagactgccggtcaaccggaatcaacaaccgttcccgtaaagccagtatgcccgatctgtaagaaaggtagcatcctgcgtggaaaaacggcttacggctgttccgaatataaagatggttgtactttccgcatggattacgccacctatggtgaaggattgtcagatgaggaattagtgaaggtgatcagtggaatcggaaaggattaaaccgacaaattggtttacactttctttacgataaatcagaacgtgaaaacataattaataaagaactacaaagtattttaaaacaaaatgggatttaataattaatctaaaatcaatgaaagaagaatggttccctttggttaatgaaaagggagagacaataggaaaagctacccgtaaggagtgccataacggatcgaaaatgttacatccggtagtgcacctacatattttcaataaagcaggtgacctctacctacaaaagcgttcgataaacaaagatatccaacccggtaaatgggatacagcagtagggggacatattgactacggagagacggtcgaagatgcccttcaccgggaagtacgggaagaattagggataacagattttatcccgcaattcatcacccgttatgtattcgaatcggctatagaaaaagagttagtcaacacctaccgtaccatttacgacggtccgatcatccctgacccttccgaactggacggtggacgtttctggtctccttccgaaatcctcgaaaatatgggaaaaggaattttcacacccaacttcgaaagggaatataaacggttattcatgtaaactacaaaaacactaaaacaatggcaaaagaattagaactcaagtacggctgtaaccccaaccagaagccatcgcgcattttcatgcagcaaggggagttgcccatagaagtcttgaacggacgtcccggatatatcaacttcctggatgctttcaacagctggcaattagtaaaagaactgaaagaagcaaccggactgcccgccgccgcttccttcaagcacgtaagtccggcaggagccgccgtaggtatcgagatgaacgatacgttgaagaaaatctattttgtggacgatcttccgctcactccgcttgcaaccgcctatgctcgcgcccgcggtgccgaccgtatgtcgtcctacggcgacttcatcgcactcagcgacatatgcgacgaagcgactgcacgcctcatcaaccgcgaagtttccgatggcgtcattgctcccgactatacattggaagcgcttgaaatcctgaaaaataaacggaaaggcacttataatgtcatcaaaatcgatccagactactgccccgcttctatcgaacacaaagaggttttcggcatcacattcgaacagagacgtaacgagatcaaattagacgaaaacctgctgaccaacatcccaaccctgaacaaaaatttcccagacgaagcgaaacgcgacctgatcatcgcccttatcacactgaaatatacgcagagtaactcagtctgctacgttaaggacggacaggccatcggtatcggtgccggtcagcaaagccgtatccactgtacccgtctggcgggcaacaaagcagatatctggtacttacgccagcatccgaaagtaatgaatctgccttggatcgagaagatccgtcgtgcagaccgagacaacacgatcgacgtctatatcagcgatgaccacgaagatgttttggccgacggtatctggcaacgttttttcactgaaaaaccggaaatcctgacacgcgaagaaaaacgtgcctggctagacacacttaaagacgtttcattgggttccgatgcctttttccccttcggtgacaatatagaacgggcacataaaagcggcgtagattatattgcacaggctggtggctccgtccgtgacgaccatgtgatcgacacatgtgacaaatatggtatcgcaatggcattcacaggtgtacggttgtttcaccattaacagagaattcttgtttttaaaacactagtgtctttcactatgaaataattccgaacttaagttatgaatcagcaaagaaatcgttaactggaacattagctataattaataaaatcttttgcaaggctcccctcccaggtagccttgtttttttcagacaacttgtgcggggaaacaaatccatatccaaaaaataatataacatcatatcattcatcccgaatcatttacgcatacttaacgcatactttactaataagattaacacaggtacttcaatcagcggaccgattactgcggcaaaagcctcgcccgaacttataccgaaaacagcgatcgctacggcgatagccaactcaaaattatttccggtagccgtaaatgatacggaagcggctttttcataatccgttcccattttccgggtgatgaagaaagaaacaaaaaacatgataccaaaatacaatattaacggtatagctattatcagtacatcatatggcaattttatgatatattcccccttataagagaacattatcacgattgtaaacaacaatgccaacaatgtaacagggcttatcttgggaataaacttttggtaataccaatccatgcctttgttattaaccagaattaaacgagtcgaaaatccaagaataaacggtattcctaagtaaatgcctacgcttttcgcaatctcggacatcgtgatttgctggacggcgtcggttgtttcaatccctacccattctgggaacacggataaaaagaaataagcatatacggaaaagaaaaggacttgaaaaatgctgttaaaagcgaccagaccggccgtatattcattacttcctcctgcgagttcgctccaaaccaagaccatagcgatacatcgtgcaagacctatcattatcagcccgtacatatattcagggtaattatgcagaaagacgatcgatagggtgaacatcaatattgggccaacgatccagttcaacaaaagtgacaatatcaagactttcttatctttgaaaacttttcctaattcttcatatttaacctttgccaaaggtgggtacatcatcaggataagcccgaccaccaaaggaatatttgtcgttccgacttcaaaattactccagaaatccacgataccgggatatatgtagcctaatcctacaccgataaacattgctaaaaagatccataccgtcaaataacggtctaaaaaagcaagttgtttcataatcactctttctttatttcagaaacatagaactggtaaaaacgatctttaatgtcatttcgtacccttataaattcactcctgataaaatccggtgttccggccgcatctgacggatcgtcaaatcctatatgcaatctttttcccacttctcccgtaaaagccggacacgtttcatttgccccgccgcaaacggttatcacataatcccatttatcatttatataatccgtcacggaagtagggatatggatacataatatcagtacccttatttttctttccatgcgatcaaggcggcgttattgtttgacaactcctttactcggtcgatccatgacaattccccttgtgccttagcctttaaaaatgggttttgagtatcaaccaaagacagacaggaatttatagcccaccatttgttctcaatacccgctctatgcaaatcctgctgtagacgttccgcttcaaaaaccggggttgtttccggaagtgtcacgataacgacttccgtttctttggggttgcgcaagcgtggcagcaagtttgccaccgctcctgtgatctctccctgtgttcgttccacttccttgtggtagctttgcgttgcgtccagcaataacaaggtgtgtccggtcggggctgtatctattaccacgatctccgtatctgctttttccactatatcggcaaaagccttgaacaccgcaatttcctgggtacacggagaacgtaaatcttcttcgatatattccatatcttcggccgtcattttgttctccctggcttttgcccttacctcgtttttataagcctccaaaacttcggcttcgtcgattttgcttatgtcgatctctgcttttatggcaaggtcatagttcaaatgattagccggatctgtcgtcgtcaaatgtacttttgctccacgttcttttaatttcagggcgatatttgttgctatggtcgtttttcctacaccgccttttcccattgtgaaaataacccgttttccggaagaaaaaagatcatctaccaaatcatccagatttttttcgccctctaaaggcttatagtcaccttccggaatgatattatcgcttgataacattttacggatattctcaatatttgacaggttataggaacgtagcggaacgctatacatcggataaccttttaattcttctggaatattatataatgcggaattttgtctttcacttaacaacctggtgacattgtcgttatcatcggaatgctgtaataccccatttattataagtatctgatttttataccaagcaaattaagttcatgtgaagaacgtgccgcctcttttaatggcgcaaggtccggccgggcaaccagtaccaagctggttactttttcatcggataaggtgcttactgcctgtttataaattccttttctttcctccaaccctgacaactggcctaagcaagacgcgccatgtgtgctctcactgataaacgtactccaggcagacggaagttgcaacattcttagggtatgccctgttggtgctgtatcaaaaatgatatgatcgtattccctttgtttggcttcatcggtaataaagtccgaaaattcattgaatgctgcgatctccaccgtacaagatccggaaagttgttcttccatatttcggattacactttccggcaatttcccacgatagggggaaatcacgctttcccggtattctgcggcggccttttccggatcaaggtttacaaccacgaggccaggaacttcggatatatccgtaccatgcccgtttaattcctgcccgaacacatcttgcaggttagaggccggatctgtacttatcaacaatatttttttgccaagatccgcaaggccgacagccgtagcgcaagcgatagaagttttacctacaccacccttacctgtgaaaaacgaatactttgtcagttgtatatcggataaattaaaattcttcataatctcattatttaataattggaacaatatctaaattaacccccgtccattcgcttaattgcttgttggttggataactctttgtaaccacgatttcgccctctactatggtaatcggcagaccgtccgcaccctctttcatcaaatagtcattaactgttttattgctgacataaagctgcggttcatcccgtaaattatggcgttcaacaatgattccttgtcttttgagagtttccagaactgccgcaatcctcataagatcaggattgatattcgggccacacaatccggtaggacaacacatcgccggatcaaaaatttctatctttttcatattctgttttattttaattataagtaattgatatatgcgtaataaataccgactgcaataaacaaggcggcaaccactctgttaaaccatttttgaaaaatctgtatgcggttatagaatttacctattccggcaacgctgtacgccaagatccaggcaaccaggataacaggcagaccggtagccacagcatagacaacgggcaaaaggtagccccccggttctgttgccgacatgggtatgagcatcccgaaataaaatagtccgctggtaggacaaaacgccagagcgaaaagcactccaagcaaaagactgcctaaattcccctttaacttttcagtctttccagttcctgaaaaaccaaattttggcaggttcaaacgatctccgaaaagcatgaatacccctacaaatatcaagaccggagcgatcagcatctcaccgtatttgctaaatgtaattcgcaaaacaacgaacaatattcttaaaaaaagggctgctattcacagcaagcaccttttttacaagcacaatcgcaaaataattgggcgaacaattgtcttgctatctcccagttttcacgatttatgcaatattttactttgggcgtttctatttcaccctgtatcagtccagcatcttttaattcttttagatgctgggaaacggtcgctttggcgataggtaactcatcgtgaatatccccaaaataacaactttcttgtttggcaagaaaatttaatatcgctatcctggtaggatgtcccaaagccttagcaaaacgggcaatttgttcttgctgctccatatctttaattcctcccttgttctattttattgttcgcaaatatacgaacaataaaatagaacacaaattatcgtttgttttttaacgaacatttataatacagatttgaaccatccgtaccgatctctatactgtttttgcggactttatcccatataataataaaagcaggcaaaaaaagaatgatattccatttatattttcgcctgcttttgatgaatacggttatatttttatatactgtcaattgtccggattgaaattcttatcatactccaataggtatttcgccatcgccggatcgttgaagtcaaccttggacagtcccgtatccagttttcggatcatctcccggtctgtttctgtcagttcgaaactctcaatgtccagattctctgtcatgcgtaacgtatgtaccgatttgggaatcgctacaataccttcacccgtcaagaaatttagagcgacctgggcactggtcttgctatatttcgccccgatatttttcagcgtttcatttgtgaaaatccggtctgtgccttgcgccagtggcccccaggccatcagacgcgttccgtaatcctttatcagttctctcattctggcctgctgggaaaacacgtgcgtctccaactgcaggacggcgggtttgatttccatgttttccaccagatcaacaaaccgggcatcatagaaattgctcaagcctatggcccggactttaccgtccctgtatgccttttccattgcccggtatgtcccatagtaatcgccaaaaggctggtgaacgagcagcaggtcgatataatcggtacggagtttgtggagcgattcgtctatgctccgtgccgccttctcctcacccgcgttggagatccatacttttgtggtcagaaacaattcttcacgcggtatgccgcatttgctgattgccgcacctacgccctcctcgttataatatgcctgtgccgtatcaatcaggcgatagccaagccggatggcttccgacacgcagtgctcacattcttgcgggccaaccaaaaagacaccatagcccagcatcggcatcttaatgccattgttcaattcgatagtattcatatcagtcatgtattttatgtgtacctattcctcttactgtcggcaggtccatgtcgtcgtaaatcggacttttccctgtatccagtccggctatgtccttcatttcttcatctgtaagcgtaaaattaaagatatccaggttttccatcatacgctctttacggacacttttcggaatgaccaccacacctctttggttcagccagcgaagaatgacctgtcccaccgtccttccgtgcttctcagcgatgtttttcagaaccggatgttggaatatgccattcttgccctctgcaaacggtgcccacgcttcatgctgtatgccttcttgctgcagaaagacattggcttccttttgctggaagaaaggatgcgtttctatctggttgacggcaggtttcacctcgttgtgcagaaagagatcctgcaaacgttcgtttccgaaactggtcaccccaatggcgcgtacacgtccctctttatacaatttttccgcagctctccatgccgcataataattgccatacggtttatgcagcagatacaaatccagatagtccagcccgagctgtttcattgagttgtcaaaggcccgaagggtgtcttcatattcatagtcctgcacccatagtttggtggtaacgaacaaatcttcgcgtttcagcccgctgtgccgtatggcatcgcctacctgtctctcgttgaaataggccgctgctgtgtcgatcatccggtagccggcttcgagtgcgtctgttacgaccctttccgtctcgttctcgggaatctggaaaaccccgaatcctatggccggcattatcactccattgttcaatcttacttccttcatcgtcatattgtttttgatttacaggtgcaaagttataggaatcatacagatacattgttacaatatacggtgagagattttcacttttcgtggtttttgtctatatttgtatccggcaaatatgaagagaatggaacaggtgatttgggataaaatatactttggggattccattaatgattgcgacccccaaaagcagttcggccatattctgcatatcctctgcatggaaggaagcatgagttttgtttttcacgatgtgaggtacaatatagccaagggcgactatgtcatcctgcccaaccgttccttggcctgctctttctcggagtcctccgactttgacgccattattatgagtctttccgaatcatttgtcacctcaatggccctgcgtagcaattacggcattatcggacacttgtcactattgcagaatccggtgatgagactttcggaaaacgacttccggaaatgtcgtaccgacatgtcgcgccttcgtgaacggctgaatgaccgggaacacctttttcgggaagaaatgctggggcatcttttgcttgcgcatatcctcgacctgtacgatattcacgcgcgggggcggaaaccggaaccgataccggaaagggcgatatcccttttgcggcaattcattgaaatgctttatcaaggagaatatgtccggcatcgtgatttgtcttattatgcgtcgcatctttgcattacgcctcattacctttcggaaatatgcaaaaaggtgggcggcgagcctgcgtcttactggatagaccgttttacgcttcacgaggtcatccgttgtttgaatcggaaggagctcccattaacggaaatcgtagagcggatgaatttctcatccctctcttatttcagccgatatgtacagaagcgtataggggtttcaccgttggaataccggaataatcgcacatcggaaataatagaggacagccagatgtattctatctcattttaaagctggtctcttatggtactataagtaacggtctacttctatgtgtatgaccgattattgccaatcagcttattgtttcacgtatattcaaatgctcatatggggatttacaagcatttcctctgtctgttgatcacttcagtttccgttatacccaccagggaacgaagcatgttcatatcagaaccggaaggttggattctaaatccggactgtatttcgagttttttctctatatagctattaatatagtctgatatataattctttgtgaaacggataaagacatatcgacagtgattgtttattataaatcggtatgcccgttccggcggaatcagatacaggtctcctgccatatatccgtgacattctttctcatcccccaacgtgtacgcatggaattttccgcttccatccagaatatagactatctcaaaaaagattactcctccaacatcccttccaaataacggtcgggagctaaccctatgctctggaggaatcccgccagagcgctatatgttaaactattctccgacaagttcaccaaggcaatccggcggagacatccgaacgggatcgcataatccacataagggaccaagttatcccctataaaatcatactcagcttctaccggatcacaaaattgcacaagccgccattcttgttcggaaacccaacgaggttcccgaacttccagacaggcattacaaagcatcgagaagaaacatgaatcccgcttgaatccggtatgctcttcatcgtaaaaaaatttgtcatactcccacttcatctgcgaaacaaacgcattcagattctcctcctcattatatttgcaacggagcaagtatttttcctccgacaaactatactcacctagtgccccgtaatcgaaagtcagccgcaaacaggaggtatccttttccttcacaccggaagggatttccaagttctggtaaagggaaagagcgtacatctccatctccggtccgataagcatccgccggttctcccggaaaaaaggaatattttgtttgctaaactcttgtttgacaccatttcgtacttcatgcaacacaatcgaacggcgaagcagggacaaaccgtatccgattacttcgtccgacttggcatacaacaaattaggaacatgcaaggtgaatgtttccggcgtcttcgactccttgcatccgcgaacaaaggattctattgaaacataggaatataaatccatcttttatgatttttttggacgccaaatatacaatttatattagagattatctacctttgttaaaacttttataaactacataaaaccaataaaacaaaatgaaacgtcgtgatttccttaagaccagtgttgtagcaggtgtagccttatctctgaattttgaaggattacaggctgctctctcctcgaatacagtagcggtagagcaagcacccgatctggtagcagtaatgggcggtgaaccggcagtcatgctcgacaaagccttagaagcgcttggcggcatcggcaaatatatcaaaaaagggcagaaagtcgttattaagcccaatatcggctgggaccgtacaccggaactggccggtaataccaatcctgaattgataaaggccctcgtaaagaaatgtttcgaagctggagccgaaaaggtaacggtattcgaccacacgtgcgacaactggcagaaatgttatgagacaagcggcatcgccgccgccgtaaaagaagcaggtggtatcatcatgccaggcaacgacgaaaaatatttcaaagaagtagacattcccgacggcgtgacactgaaaaaagccaagatacacgagtcactgatcgaagcggacgcctggatcaatgttcccatcctgaagaaccacggaggagccaagctgtcatgcgcaatgaagaatatgatggggatcgtctgggaccgccgcttcttccaccagaacgacttgcagcaatgtatcgccgatatctgtacctggaagaagaaaccggttctgaacatcgtggatgcctaccgcatgatgcatcagaacggtccgcaaggaaaaagtgcagctgacgtggctacgttgaaatcgatgattgtttctccgaatatcgtcgccgtcgatacggccgccctcgctctgttcaaccaggtaaagaaattggatatggctgccgttggacatttgagcaaaggggaagctcttaaattaggttctaccgatctgaaaaaaataaacatcaaacgtattaagatctgatgaagaaacggaattatctaaagggattgagggttttgctcgcaatcctcttttttgtacccatacttttgtttttcgtagacttttcaggagttttaccggatagtgtacatcgtttgctgcatctgcaactgatgccggccttgttgggaggaatggtcggtctgatcgtgttccaattcttgctggcactggcattcggacgtatttattgttccacgatatgtccggcaggcgtattccaggatatcatcaaccgtctattttgcatcggtaagaaaaagaagaaaggaagccgtcgttttacttaccacaagccgatgaaccggctacgctacgtactgctggtaattacggcagtcatggctgttttcggtcttagcgaattgtgcctgctcttagacccgtacagcaacttcggacgtattgcggcaagtctgttccgtccgatcgtgatgtgggggaataacatactcgccgacctgctgatgaaagtggacaactactcgttgttccatgtgacaatcagtaccgtgacggtttccggtctgatcgcagcaaccatcgcattgcttgttttcatcgtcatgactgttttccgcggacgattgttctgtaatacgatctgccctgtcggagctttgttgagtcttttctcgcgctactcgttcttccgtataactttcgataaggaagcctgtacgcattgcgggaattgcgaacatacctgcaaggcggaagcgatcgacagcaaaaacctgacgatcgatacatcccgttgcgtagattgtttcaattgtgtttcttcctgtgccaaaggcggcttgcagtatcgtctacaatttccgggtatgaaacaggaggagacagtcgatacccaagctgtaaaggaattatattccagccaactgacagtcgccaacagccgccgtacatttctggccacaagtgcaaccattgccgcctcgctgccgatcgcatctgcgattgccgaaggaggaaaaggaaaaatgaacagaaaaggcagaaagaagtggcctcccctcacgcctccgggttctatcagcctggaacgtttcaaagacaaatgtacaggatgccagatatgtgtcgtccgctgtccgagccaggtcttgcgcccgacaggattggaatacggtttggattatatgttgaaaccacgtctggcctatatcagcagttattgcaactacgagtgcacagtctgttccgacgtatgccctaccggtgcgatcaaacctctgactatcgaagagaagacaacgacacaggtcggcattgccactttcttcaaaggccgttgtgttgttaatacggaagagaaagactgcggtgcctgtgcagaacattgcccgacccaggccgtacacatggttccttacaaaggaacactgacaatcccgcagatcaaccctgacctttgtatcggatgcggcggatgcgaatcgatctgtccggtacgcccaatgcgtgccatcatcgtcaaatcgaacgttgagcacaaattcgtcgaaaagcctaaagaagaggaaatcaaagaaattgaggtagacgatttcggtttctgattaacgatatataaccgactatattatgaggccttatttgtgaaagtaaggccttttctttatctttgcagccatgaaattcgaattacaacataacgacacaaaatcaaatgcaagggcgggtctgattaccactgatcatggagtaattgaaacgcctatttttatgccggtcggcacacaaggcacagttaaaggcgtccacatgaccgagttggaagaagatatcaacgcacaaatcattttaggaaacacataccatttatatctccgtcccggattggaaatattggaacaggcaggcggattgcacaaattcaacacatggaaccggccaatcctgacagatagcggtggtttccaggttttttctctttccgaaaaccgcaagttgcatgaggaaggcgccatgttccgctcacatatcgacggctccaagcatctgtttaccccggaaaaggttatggatatccagcggatcatcggggcggatatcattatggctttcgatgaatgttgtccgggcgatgccgattatgaatacgcgaaaaagtccctcggtctgacggaacgttggctggaccgttgtttcgaacgtttcaactctacagagccgaaatacggttaccagcaaagtcttttcccaattgtacaaggttgtgtttatccggaactgcgccgaaaggcagccgagaatgtagcggaaaagggcgctgacggcaatgcgatcggtggcctggcagtaggcgaaccaacagagaagatgtacgagatgatcgaagtagtcaacgagatcctgccgaaagacaagcctcgttacctaatgggagtcggcacaccgatcaatattttagaggggattgaacggggtatcgatatgttcgactgcatcatgccgacgcgcaacggacgtaacggacagatatttacccgcttcggcacgatcaatatgcgtaataagaaatgggagaacgacttctctcctatcgatccggatgctcattcggctatcgacacgcgctacagcaaggcgtatctacaccatttgatcaaagtgaatgagatgttaggacttcaactggcatcaattcataacctcgcgttttacctgtggctcgtaaaagaggcacgcaaacatattattgccggcgatttcacgacctggaaaagtgaaatggtccgtcaattatcaaaccggttataagcaaactgtcacatgaaattcaaactgaaacggatagactggtatatcatcaagcaattcttaggtacttatatctttgcgattgccctgattatcgctatctcggtcgtcttcgatataaatgagaagatcgacaagttcctgagtccggacgtaccgttgaaagcgattgtcttcgactattacatgaacttcatcccgtatttcgcgaatctgttcagtccgttgtttactttcattgccgttatcttcttcacctcaaagttagcagacaattcagaagtgatcgcaatgttggcgagcgggatgagtttccggcgtctgatgttgccttacgcgatttcggcagggatcattgcactcagtacgtttgtgctgaacgcttatatcattccgcctgccaacgccacgcgtatcgacttccaaaacaaatatatcaagaataagaaggtagactatgtccgttccgcccaattggagatcgagccgggcgtaatcgcctatttcgaccgctacgacgcgcgttccgggatgggataccgtttctctttggagcacttcgagaacaagaagatgatttcacgcctcacggcaaactccatcaaatacgattcgctatacaattggacgctgatcgactacatgatccgcgacttcgacgggatgcgcgaacatatcaccgaagggagccgcatggacaccacattgacaatcgtcccttcggacttcctgatctctgtcaatgactgcgagacgatgacttcttccgaactgtccacgtatatcgaccgccagaagaaaagagggatcggcaatatccagacgttccagatcgaataccacaaacgttttgccgccatcatggccgccttcatcctgacctccatcggagcctcgctctcttcccgcaagatcaaaggaggcatggggttaaacatcggcatcggactggccttgagtttctcctacatcctcttcaccaccgtcacatcgaccttcgccatcaacggcaacctcagccctgctatggccgcctggattccgaatatattgtatacgtttatcgcgatttatttgtaccggaaggcaccgagataagaaatgttttgcaaaaccaaccatcatactatcataatcgtccgtatattgttttaaaacagtgtgttacgacatgacagttgccgttttatactatcattcatctgtcataaccatcatggaaaaaaacgataatattctgtgtatcaatcaacaataaaaacagaaaccgtccgggaatagatgcaaaacaggttaaaatagcttcatttttcatcaagacaggcttttcttttgcccaaaaaggcttggatagccgcttaagacccgggtgtaagcaccacggagacccgagtgagggagaggtgcagatccgggtctgtgcaaggcctttccgtggatgtgtggatgtttatccgccatgctgggggtgtttttatgtctcgtttttgcattttgtccggcaaaaaaggctgttttcattagaaaaacgacctcgttttgtcgatggccatttgggcttacataaatgcaaacagcccattatcaatcatataagtaaaccagcaagtaaaaagcatgatagatgcatgatggtagaatgatagtggaaaacagcaactgtcatactttaatatattgtgtaacaacagctaataaccaaaaatgatagtatgatggttggtttgcgaaattttcatgaaagaagagaggtgatcccgaatagtaatttttggtgcggttaccctgattacctttagagttttccaaaagcaacaggcagctcttttcgctaaaaccctcgtttaagatagatttcatcccatctgaacggttttgaggaatgtcgaagggccggcatccggtgtcaaaaggaataccggataaaggctcatgccgagcatacaaaaaaagaggatacatagtctcgatgcatcctcttttcctttaaatttaatgaattacttaatcaatttcaatccaacttcaaacttagttgtcttttccatcgcttcggggaaggctttcagtattgacttaaccaattgtcccattccgtttaaagcgtcatctccgataagttcagccaacgtaggcaataaaggagcgatctggctaactaaagctttgtcaatatagacacgggctgacttgccatcagaagcgatttcataattaacaggaatgccattctgcaataaagccataatttgttccaaaggatctatagcagccttactcttcaaacttcccatgatcttagttatatccaagaagacaagtatttgcttatccgtcacattataggaagcatatccaggttccgatgtttcccaaacaggtgtgacaggcttgctcaaatccactcccgctttagaaatagaagcaacaatctgcccgtcttcctggaacgtaacactctgaaggacctgtaccaaagcgatacttccaaaaccttcagctatattaggaatagaagtcacaggtaaaaaaccaagcatagtgccttcagcagcttcccaaaccatagacacaggacctgatacaaaagtttcactctcgtcttttgctatttcagccaatttccaagtacctgcaataggagctgttattttcaaagttgcatccaaagtcaaaacaccggcttcaacggttccttttgcagagacagttcgcaaatcattcgtgttgcttccttccaatgcatagctttcacctgtcttgaccattttggcttcaatcttgacttctgcttcacccggaatcaaattcgccaacgtaatagttgcctgttcagccgaacttgcatctacttttacagattggtcagcgacttcagtgcctcccatcgtcaatttcaatgtttctgccgtataagtcgcagaaatagccttccagccgtcatcagtcttattgtcatcatcgtcactacaagcagtgaagaaactcaatgcacaaagcatcgtaaacacaaaaaatagatttttcttcataatcttctttttaaattatacataaaaacagagcgaagataagtaatcttaatgagacatacaatacaaaaaagttaatgccggttattccgaaaaaataaccggcattatcataaaaatagacaattcaatcgataaaattgaatcaattatacaagattattttttgacttcagacaacgctcccgccgctttcagatattcgacataattcaagtagagttgaaaatgggcatcgacctgtgtttcataagcctgctgccacaaagcctgcgcttcgagatagtccgagagtgtctccaagcccacttcgtactggcttttactgaccttcatgttttcttcggcctggaggagagaacggtcggaaagttcgctttccagccgggcttcgtcgaggttattggcggcttgtgtcagttccaacatcatttgttcgttcatgttttcctgttccaggcgggattgcatctgcttggctttggcggcacgcaccttattacttcgctcgccgaaatggaaaagcgggatgctcacgttcagcaagacggagaaactgcctttgtccatcaacatctggtcgttcagttcaaagccgtgtacataatcataagaccccatgatgccgactttgggcaacagctcgctacggttcagccgcacctgctgcccggcgatctcgacctgtttatccaagatggcatattcgggacgggcactgatatcggaaacctggacatccatccccttttcgaccgccggataattgccggaaatacggatatcggagacaagcggtttcccgatcagatggcaaagattcatagtcgccaaccgcagggcgttctctgctttacggatggagagttcgctttcgttcagcttcacctgcactttcaagacatcgttctgcggtttcaagccatgtttgtaagcgctctcgacattcgacagcagttcccggagcacagcgttatatttatccgccacctttttcatctcctgtgccttcacgaccagggcataggctttgtctgttttgaggatcacttccgtcgccgtcagcgcctcgttcatctcggccatctctttccccaagacagacatccggtaggcagcccggatcttaccgcccatataaagcggctgctcgacccggattccgcccatgtagactgtcccgactttataatcgagattgataccggggaaatgggtataaatgcctgtcgggaccaagttcccggctgcatcatacagaataacgggcattttgccaccttcaattccgaatccgccgtccgccgtactgtaaaggcccatcccgttagcggtaaagttcgggaagaaattccctttatagcttttcatcgtgtacagggcactttcggtctgtttcaccgatgccgccatttccttattatattgcagcgccatttcccggcactgctgcaagctcaacgtctcctgtgcgaaaagagacgacgggcagagaatagacaacaggataatagatattttcttcatcagtctacatgtttaatatgaaagaataatgcgtataggacaggaataaaaacgagtgtgatcaccgttccgaacagcaggccgcccataatggatgctgcaagcgaaccgaacatggcgtcggtcagcaacgggatcatccctaagatcgtggtcaaggccgccatcatcaccggccgcagacggctctgggcactgtcgatcaaggcggtgaccggctccgtcccctgcccgatctgcaaagtgatctcgtccatcagcacgataccgttctttatgatcattcctatcaaccccaatgtcccgacaatggcgacaaagttgaacgtcttgccggtcaccaacatcgtcatcaccactccgacaaataccatcgggatactgcagaagatgatagccggcttgcggtaatccttgaacagcatgatcaagatcgcgatcatcaggataatggccagcgggaaattcttgaacagatacttcatggactggtcgctggcgttcttctcaccctgccattgcagcgaatagcctgcggggagttcgatctgctccaacttttccgcgactgccaatcgtgctttttccgtctcgacacccggcacgggagagcattgcacgcgctggctgcgttgtccgttgtagcgagggacaaccgggtcctcccatcgcacgtcaattcccttgctgatctgtttcaacggcgtgctgcccatcaggctttcgatcagttcttccttcgatagtgtcccggctttcagtttcaccatgatttcttcgttcagcaggccgttcagcgaagggagcgtcgaaaagacctgcgtgtttcctaaatcctcgatcggttttccctgtccgtccagacatttcaagtaaatattgtttttatggatgccttcgtagaaagaaccgataggtataccgcccgtagctgtcagtaacgaaaggctcacgtcgctgcggctgaatcccaacgcacgggcggccggttggtcgtactcgattgtcaggaccggaacctgcggttcccagtcggtcgtgatcaggcagacttccggcgtattctccataatatgtcgtgcactgtccgccaaacggtgcaggacggcaggatcaggtcctaagaattgggcctcgatgggatatttcttaaacatcaggttataacgtttcaacttgacgtaagcatccggatactgccgtgtcaggaactcttgtatctcgtcgatattttcgactagctcgtcgggagatgtaaagtcgatgatcaactccccataggccagcgaaggattggcaatgcttcgcaccaggttgtaacgtcccggcgtcccaccgatggaagctgtcacgttcgtgatctccttccgggttttcagataagcttctatctctttcaggtcattcgccacacgggtagaattattaccctccggaagtttgtattccatatacaactgatcatacaccatatcggggaagaatccctggcgcaggaaccgatagctgtaggcggacaagagcaacaaagcgaccatcgtcagcgtaaagccaaggcggtgcgacaaaccgaaacgcaaagcagcccgcaagatggcatatatcttacctttatatacacgcttgccggaattatcgttttccaccgccggatgtaaccgcctgtttgccatcaagggaacgtggagtaatgccaacacccagctcagcaacagtgaaacggccagtacgataaacaggtcgcgcgtataaacgcctgccgtatccggcgacatataaatcggcagaaaggctatgatagcgatcaacgtcgctcccaacaacggcatcgccgtctgccgtccgatagcggtcatcgcctccatcctatctttcccggctttcaagtccaccaatatgccgtcgataatcacaatggcattgtctaccagcatccccatcgccagcacgaaagccgccagagagacacgctgcatcgttcccccggcgaattgcaggaaaagaaatgatccgaaaacagtcaccaccaaactgatgccgataatcaggccactcttgaaccccatcgccagcatcagtataaacacgacgatgacgacggattcgatcaggttgatgacaaacgttcccagcgaatcctccacacgctcgggctgatagaatattttatggcaatctactccggccggcagacggttatctttcaactccgccagcttcgcttccacggctttgccgaccttcacgatatccgaaccgctcgaagcagctaccaaaatgccgatagagcgctcctggttatagaacatctcgttacgggttggatcttcataccccttttcgatcaaggctatgtcgcgcagacgcaattggtcgtcgtcatggccctggataaacatcttgccgatgtcgtccaccgttttgaaacgatcgttcaccgtcactcggatgcggttgtccccgttatcatagtaaccgctataggttgtctcgttttgtccgttcaaggtagccaggacttcggccggtttcacgccgaggttggccatgcggtcctgcaacagggagatattgatacattcggaacgttccccatatatatccacccggtccactccttctatttcgactacttcccgtttgatcagttcggcataatcagccatctccctatcggacagtccatcgcccgtcaatgcgtagaacatgccgaacaccttgccgaaatcgtcttgtacgatcggtgtattagctccggaaggaagtaaggcggaggcatcgttgactttccgcctgagaaggtcccaatgttgctccacgtcatcgtccttgacggtggtcagcagttcgacctggatcaaggacagatcattgaacgaatagctttcgacattatcgacattgtccatcttacggatacttttttcgagcacatccgtcacttccaactccacctgatgggccgatgcacccggataggtagttgccaccattgccagctttaccttgatctccggatcttccagcttactcatttgatagcaggccaaagctccgcccgccaacaaaaccgcaaccagaaaatagaccaggttccggttctgaaatccccatttgcttatatccatcacaacaatcctcctacattcgttttagaaccggtggccaaaggccggacattttctccatcttcaatatgatgcacgccggaggcaaccacgatttcaccggcatgcagcgtatcggaaacaaccatcgcacgtccgtcggacaacaggcgcagaaccgtcacctcgcggctatggactttccccgcggacggatcatagacaaacacgtacgttttaccatccttttgcagaagtgccccgcccggaacggaaaccggctgcgaatcgccctcattgcaatagatcgtgaccatcgtattcattcccggcgaagggagaggtaacttgccgggaaccatttgcaggcgcatcgtgtacagctggttcgcattggctttcggagtgacgctgatcaatttcaaaggatagttttctcccggatagaggtcgaacgtgcagtggtagccatcgaaccggtcccgccggatatagtcggctgccggaagattgatttccacctccggaatgccggcgctgaccatcgagatcacgggcatacctgctccgatcgtttcatgtgcatcgaacagctttttctgtatgaaaccactgaatggagcatacagccgagtatattccaactggtctttatgatgctgatattttgcagtgatctgtttcaggccgtacacggctttatcgttggcattaggcgtggtcccgttttctttataaagagccatgacacgttcggcttccgccttgatctgcttgtattcggcctccgtagcatccagttgcacccgataatctgccggatccaattcggccagcagttgtccttccctcacgcgggcgccgtcttccacatatattttacggattgtcccgctcacacggaaagccaggctgatatcctgcgcagctttcacttttcctgggaactggagggcagtctgactactggcggaaacggccgtatcgatcttgactgtctgagtatcctttgtccccttctccgaacgggcacaagacataaatagaatcaaggatatacctgctaaaataaaataaattcgtttcataatttaagtgtatttatttaaagacaaaattatcccgacagagcaacctcggaaaggtcaatatgaataataaattgttccatttgtatattttcctcaaaaagaagatataaatattctgcgatttgtattttctttaccgaaaattcttaacttgataaaagaatgtcacctaaagaataccgtaagtagcttttggaattgttaaaatgcccaaaacatgtcgtcatacatttgaaagcaaaaagccagttttagtatagttgttccactgctccacaagaactatagaatattttatgtacttttgtctcagaatataaaaaaactaaataactcaaattaatcaacatgaaacgcttaatggctaatcataaacagaaaaaagcgatcctgatcgctcttgctgcgccattgatgttttctcctgcccctttaatggctgtgaccggaacctccgagcctgtagtagctatcgcccggcaggcgcaaacgatcgtcagtgtgcagcagatcaacccgactacggtcgatgttgtgttctccaacaatcaacggatgacattcgatttctatggagataatattttccgtatgttccaggacaacaacggtggtatccttcgtgatccggaggcaaaaccagaggcccggattctcgtagataccccccgtcgcccagtttccaaactggacattcaagacgataatgggcaagtgaccatcacgaccggaaaagtcagactccagttggacaaatcgaccgccctgctgaaagtcaccaatctcaccacaaacaaaatcgttttcgaagagacgaaacccgtggtttacgaaaaaggaaaaacgatcctaacgctgaaagagaaccctgatgaatatttctacggcggcggtgtgcagaacggacgcttttcacataagggaaaagctatagccatcgaaaaccagaacagctggaccgatggcggcgtggcttctcccactcctttttattggtccacaaacggctacggctttatgtggtacactttcaaacaggggaaatatgatttcggcgccacagaaaagaatacggtaaaactatcccacgatacagactatctggatgttttctatatgatcaatgatagcccggtcgccctattgaacgacttttaccaactgaccggtaacccaatactgctgcccaagttcggattctatcagggacacttgaacgcttacaaccgcgactattgggtagaaggcgaaaagggtatccttttcgaagacggcaagcgctacaaggaaagccaaaaaaataatggaggtatcaaggaatcgctgaatggagaaaagaacaactaccagttctctgctcgcgccgtgatcgaccgctacaagaaccacgatatgccgttaggttggttgctgccgaacgacggttacggagccggctacggacagaccgaaacattggacggtaatatccaaaacttaaagagcctcaccgattacgctcataagaacggtgtcgaaatcggtctttggacacaatccgacctgcatccgaaagacagcatcagtgccttgctgcaacgcgacattgtaaaggaggtacgagatgccggtgtacgagtcctgaaaacagacgtggcatgggtcggttggggctactcgttcggtctgaacggtgtggctgatgtcggacatatcatgccgtattacggaaacgacgcacgtccgttcatcatctctctcgacggttgggccggcacgcagcgttatgccggagtctggtcgggcgaccagacaggcggacaatgggaatatatccgtttccacatcccgacttatatcggctccgggctttccggacaaccgaacatcacatccgacatggacggtattttcggtggcaagaacctcgtgatgaatacccgcgacttccagtggaagacctggacgccgatggagctgaacatggacggctggggatcgaatgagaaatatccgcatgccttaggcgaaccggcaacttccatcaaccgctggtacctgaaaatgaaatcctgcctgatgccgtatgcttacagcattgcccgcgaagcggtagacggcaagccgatgattcgcgccatgttccttgaagatccgaatccttacacctttggtaaagctacacaataccagttcatgtacgggccgtacttcctcatcgcgccgatctaccaagagacgcaaatggatgacaagggaaatgacatccgtgatggtatctacctgcctaaaggcgaatggttcgactatttcaccggtgagaaatataccggcggctgcgtggtcaacaacttcgcttctccactttggaaacttccggtattcgtaaaagccggtgcgatcatcccgatgacgaacccgaacaataacgtaggggaaatcgacaagaatttgcgcatatatgaactttacccgtccggatatagcgagttcgtcgaatatgacgatgatggtataacgcaggcttatctgaacggcaaagggacaaccacacggatcgaaatcaagaacaatgccccatcaaaagtctcaatcactatccatccgacaacaggcgattttgacggtttcgtaaaagacaaggcaaccgaactgcgtatcaatctctcggaaatgccgaagaagatcaccgctaaagtcggttcctccaaagtgaaactggtagccgcccgttcgatgaacgaataccagaacggcacgaatgtctatttctacgatgttgccccgaacctgaacaaattcgccaccaaaggaagcgaattcgaaaagaagacaatcaccaagaaccctcagttgttagtaaaactagctccgacagacatcagcatgaacggaacggttatcaccatcgatggttaccaattcgacacgcccgacacccaccgcgtttctaccggttctttggccgcgccgatcgcacaggtgacggatgggaacacggaagcttacacactaaaaccgacttggaataaagttcccggcgccgacttctatgaaatagaatttaacggcatgctttatacgcagatcaagaatgcggaactgctgttcgacaacctctcagccgaaacagactattcgttcaaaattcgctcagtcaacaaggacggttattcagactggtctaccttctccgtcaagaccaaatccaacccgctggaatttgctatcaaaggcatccgtggagaagtgacagccgaagaacaggaaggctttgaaatctcccgcttgttcgactttgccgagttaggcgatatgttccacacgaaataccgcaagaacgcaatgccgttcgatatgatcatcgatctacgcaccatcaaccaactggataagttccattatctgtcccgccaggatggaggcaacggaacgatccttgccggcgacgtggcctacagcatggataaggaaaactggacagcggtcgactcgttccgctgggaacgtaatggtgacatgaaagtattcactttcaaggaccaaccgaaagcccgctacattaaattgcatattacggaaggtgtcggcaactacgcttccggacgcgaattatacgtattcaaggttccgggcacggaaagctatctgccaggtgacatcaataacgacaaaaagatcgacacaaacgacttgacctcgtacatgaactacacagggctacgccgtggtgacagcgatttcgattatgtcagcgcaggtgatattaaccggaacggtctgatcgatgcttacgacatatcggtcgtggcaacccaattggaggacggcatcgagaatccaggtacggaccgtgtagccggaacgatcttcctttccactccgaaacagacgtacaacgccggcgaaacagtcgaaatcactgtcaaaggtgacagtgtcaaagctgtcaacgctttgagtttcgcattgccttacgaccaacaggattatgactttgtcggcatcgaaccggcaaacctcggtacgatggaaaacctgacatacgaccgcctgcataccagcggtcaaaaggcgctctatcctactttcgtcaatctcggagacaaacaagtgctcgaaggttctgaagatctcttcaccatcaagctgaaaacgaaacgcaaagttacattcaacctgaaagcagtcgacggcatcctagttgataagaatctgaatatgcagaagttctgaacaatgaatttctgatataaacgaaagcagaaaggcttcgcctaccggaccattccggggtgaagcctttttcattaagattatgaatgttttctgccccacagatgttatctttgcagaaaaagcgatagaaccatcgcatgacaaagcaaacaaatacattatgtactcagataaaaaaaacatcctgcagctcgtagccctgctcatcgagcataacatcaagaaaatcgttttgtgtcccggcagccgcaattcacctattgtacatacgattgccaatcacccgttcttctcctgctatccggtgacagacgaacggagtgcggcattcttcgcgatcgggctggcattacatggcggtagtccggctgctgtctgctgcacatcgggcagtgcattacttaatattcatcctgccgtatcggaagccttctatcagcaagtgccattggtcgtaatctcagcagaccgtcccggggcctggatcggacaaatggacgggcaaacgtttcctcaaccgggtgttttcggttcgcaggttaaaaaatccgtcaacctgccggagatacataccgatgaagacgaatggtattgcaatcgtcttatcaacgaagctctgctcgaactgaaccatcatgggaaaggaccggtgcatatcaacgtaccaatctcggaaccgttgttccgcttcactacggaggaattgcccaaggtacgcgtcatcacccgctaccaaggattaaatgtctacgaccgtgaatatactgggttgatcgagcggctgaacaactacaaccgtcgcatgatcgttgccggtcagatgaacctgatctatctttttgaaaagaaatattccaaactgctatacaagcattttgcctggcttaccgagcacacaggtaacaagaccattcccggcatcccggtaaagaatttcgacgccgccctttacgccctgccagaagaaaaattagagaagatggttcctgacctgctgatcacatacggtggacatatcgtgtcgaaacgcctcaaacaatttctccgcaagcatccgccacgcgaacattggcatgtttcgcttagcggagaagtaacagacctttacggttccctgacaaccgttatcgagatggacccgttcgaatttctcgaaaaaatcgcttacctgctggaaaaccggacaacggagtttccacgcatctgggaaaacaacacccgcgacctgccacaaccggaattcagctattcggaaatggctgctatcggaacattgatcaagtcgcttccaacacctgcggccttgcatttaggcaacagttcagccgtacgttacgcccagttatacacactcccagaagatgtcgaagtctgttgcaacagggggacgagcggcatagaaggatcgctttcgactgccatcggttactccgtttgttcagacaaactgaattttgtagtgatcggcgatttgagtttcttttatgatatgaacgcactttggaacagcaacttcggctgtaacctacgtatcctgctgctcaataacggaggaggtgaaatattccaagcacttcccggactgaaaatggaggataaaacacgccgtttcgtgacagctacacacaaaacttctgccaaaggatgggccaaagaaagaggattctcttaccttcccgtccataacgatgaagaactgacgagtgcaatggctgttttcacccagtccgccccccacaaccaaccaatgttgatggaggtattcacggatgcgtctgaagatgtacggctactcaaagagtatttccaccaactaaaaaaataagaacataactcataatttataattctaaattcatcttatggaaacaaaaagagaatggacaaccatcaaagaatatgaagaaatcctgttcgatttctataacggaattgcccgcatcactatcaaccgcgaacgctatcgcaacgctttcactccgacaacgacgacggagatgagcgatgctctctatatctgccgtgaacgaccggatatcaatgttgtcgtgctgacaggagccggagacacggctttctgtgctggaggtgatatgcatgtgaaaggtcacggcggctacatcggtaaagatggtgtggcacggttaaatgtactcgatgtacaaaagcaaatccgctcgattccaaaaccggtgatcgctgccgtaaacggttttgcaatcggtggcgggcatgtgttgcatgtggtctgcgacctgacgattgcttctgaaaacgcaatattcggacagacgggtcctcgtgtggggagtttcgacgcaggtttcggttcttcctatttagctcgcatcgtcggccaaaagaaagcacgtgaaatttggtttctttgccgcaaatacaatgcacaggaagcactcgacatgggtctcgtgaacaaggtcgtacctttggataagcttgaagacgaatatgtcggatgggccgaagaaatgatgctgctcagcccgcttgccctccgtatgatcaaggcaggcctcaacgccgaactagacggtcaagccggaatccaagagttggctggcgatgccaccatgctctactacatgaccgacgaagcccaggaaggtggcaaagctttccttgaaaaacgccgcccccgtttcgaagattatccgaaattcccataatccaaagtcacaatggctatgcactatcacatagagatccgccctaagaccttgtacttcaaaaagccggcagggacttcgcgcgggacctacacggagaggaagagttggtatatctacctcaccgcagaagaaacacccggccgccaaggaataggcgaatgcgctcctctgcctaaactgagttgcgacgacgtgcctggatatgaagaagttttggccaaggcttgccaaaacttcacccgcacaggcagaatcgacgtggacggactgcgcgattatccatctatcctgttcggtctggagactgctttccgccactttgaagccggctcctttgccttgtggaacactcctttctcgcatggcgaggtgggtattcctatcaacggactgatctggatgggaagctatgaagagatgttgggacaagtgacagacaagatagaatccggctttcgttgcatcaagctgaaaatcggagcgatcgacttcgataaagaattagaaatccttcgtatcatccgcaaacaattttcatctgatgaaatcgaactgcgtgttgatgccaacggtgctttctcgccgaacgaagccatgagaaaactgaactgtctggcaaaactggacctgcattcgatcgaacaaccgatccgtgcaggacagtgggaagacatggctctgttagctgcttcttctccagttcccatcgccctcgacgaagaactcattggctacaacacaccggaaaagaagaaagaattgctttccttcattaatccgcaatatatcatcttgaaaccgtctcttcacggaggcctatatggttgtagcgaatggatcaaggaagctcaggatcggcagatcggctggtggatcacttctgcattggaatcaaatgtcggcctgaacgccatcgctcaatggtgcgcaactttcgacaatccgcttccgcaagggttaggaacaggtggcctcttcaccaacaacattgacttgccgttgtcaattaacaacggacaattaataattgacaatggacaacaaacaattgataagtaagaaacatcccgataattgtcaattgtcaacagtcaattgccaattatccgaattcatttccgattggaagtctgcctctccttacttggaagtacaaacttccggttcgaccggtacacccaaacgaatcatggtccgcaaggaacagatggtaaatagtgcccgcctcacctgcgattatttagggctgcggcagggggataaagccctcctttgtatgccactccgatacattgccggaaagatgatggtcgtacggtcactcgtggcagggttagatttggtcatacgtgaaccttccgggcatccgatggcagacatcgacatgccactccgattcgcagccatgattccgttacaagtatacaacacgctacaggttccggaagaacgagagcgcctctgccaaatcgatatcctaatcatcggtggcggctctatcgaccatgaactggaaacacggatacaagaattgcctatctgcgtttactccacctacggaatgacagaaactctttcgcatatcgccctccgacggttgaacggaccggatgcatctccttattacacgcctttcccgtctgtcaagctatcactctcgactgacgacacactgataatagacgctccactcgtcaccgacgaaacacttgtcactaacgatgtcgccgaactgctcccagacggccgtttccgcatcttagggaggaaagacaacatcatcaacagcggaggcataaaaatacaaacggagattgtggaagaaatcttgcgccccatcattcctaccaattttgccataacatccgttccagatccaaagttcggagaggctatgattttattgatcaccacaggaaatgaccgcttcccgagtaaaaagacagcctcttcccttattggagaacaatctctctcattacctgaaaacaatctcttttccgagctggaagaaatgatatttggaatattacccaaataccaacgtccgaagcacatcctccggattgaatcaatccctcttaccggtagcggaaagatcgatcgggcggcatgccggaaattggcaatggaaagatatacaggataaattaattcgggcatcaattatttagtaataaacatacaaaaacactatattttatgaagtatttatcaatcttcgcctccgcccttctcgccacggcgtccgcttacggacaaagtggggaaagttgccggacggcatccgatccgactctacaaaagccggaattatacgcaggttatgactgtgtaaacctactcgacagcaccgctgtgaccgtgcagcctaccggctccggttctttcacggtctgcaaaatcgtcaaagttatgaacacgcgcggggccgtcgccaatcgcatcctcaaatacgattacgacccgctgacggcacatgcagaatttcatcgtgtcaccatctacaaagccaatggcgacgtaatcaacctcgatatcacccaacagcaggattatgccgctcctgcccgcgccatctattggggagcacggcagatcatgatggaaataggccgtctcgatccgggcgatatcatcgattatcagatcaacaaaaaaggtttcacctatgccctgttgactggcggtataggcaacgacgaatcccgtttcatcccgcccatgcgcggacaattctatgatatcgtccccttctggacaaccgagccaactgtccgcaaggtatataaggtaaacatcccgatggagaaagaaatgcagttccagttctatcaaggagaatgcacctcttccatgcgttacgaggacggtcggaaagcttatacgttcgtcagcacagacatcatgccgacccgacgcgaaccgaacatggtcgacctgttcgacgccgcaccgaaactgatgatgtccagcacaccacgctggcaagacaaatccctttggtttaacaaagtgaacgaagactacggcagtttcagtgccattcccgaagcccagaaaaaagtagacgaattgatccagggcaaaaagacggagatggaaaagatcgccgtcctcacccactgggttgccgacaatatccgttactccggtatttcgatgggcaaaggcgaaggctacacgctgcataacctgaagatgaactacacggaccgttgtggtgtctgtaaagatattgccggtaccctgatcgctttcctgcgtatggcaggcttcgaagcctatccagccatgacaatggccggtagtcgcgtggaaagcatcccggccgaccacttcaaccactgtgtcgccgttgtgaaactttccagcggaacctatatgccgctcgatcctacctgggtccccttctgccgcgaactgtggagcagtgccgaacagcagcaaaactatttaccgggagttcccgaaggttccgatctctgtctcacgccggtttccgcaccggaaaaccattatgtccgcataaaagccaacaaccgcttggatgccaaaggtacgctgacaggacagtttacgatcacagccgaaggacagtcggacagcaatatccgccgtatcttcaccaccggctggcagtcgcaatggcaggccgcattggaaagccaacttcttgccgtatcacctaaagctcgtcttatcagcgtggactatggcaaagacccgaagaactaccaggctgcaccgatcaaaatgacattccgttatgaaataccagattatgccctttcaggagaaggagaaatgctgttcaagccgatggtgatgaataacctttataaccaagtaaaaagttacctgcgcatcaacaccgacctcgaagaacgccggtatggtttcaaggatgcctgctcacgtctggtcgaactggacgaaacgatccaactccccacaggttataagctagcgggtaatggaaaagaagacagtgtgcaaagttctgccgccgacttcgaaggttccctccgccaggacggtaacaaagtggtgttgcaccaaaagctagcgctgaagaaacgcgtgtacgaggcaggcgactggaatggtttccgtaacgccgtgaatgcacataaatcattcggggattatatcgtcataaagcgataaggtcttccctcttcataaatcacaaattataaatcataaatcaaatgatacaaaacaaacataagttcgccttccttctttgtatgctactaatgactacgacagtttttggagcatcggaagccgaatacaagaaattagcaaagacctggacactcaatgccgacggcagccaaaagttccgctataaaatggaactgacacttttcacccacacggccatgaacggcacatacggagaaagcttcatcgtgtacaatccgcaataccaggaactgaagatcaactcgtcttacaccaaacaaaaagacggcacaatcatcaagacaccggacaatgctttcgtggaagtccttccccgcaacgcggctgatgctccggcttacaaccacctgaaagaaatggttgtcgtccacacaggcctagaactgggagcaactatctatctcgactacacagtcacatccaaaccaggctatctgccggaggtagacattttcgaagaactgctccaatcctctcccgtcaaagaatacacactgacgatcgtgacacccgaagtcaaagaacttgcctacacactgacaaacaatccggcaaaagcatctgtcaaacgatccggtggaacctgtacgacaagctggacattacgtaacctgccagcatcttcccgcgctccgttcgtctatgtcaagaacggcgacgttccttttctcgccgccacgacttacgcatccgaaggagaagcattggcaaccctgctcaaacagttcaatccgtccggcgatccacaactcacgactctggctgagagcctgaccgaaggggaaaaaaaggacgaagacaaactggaagctatcctcgaatacacgaccaaccacattgccaacaacgggctgacattggatcagaccggctatcgcctccgccctgccgatgccgtcatgagcacagcgtacggaactgaagtcgaaaaagccaatttgctcgcaggcttgttggatggggccggcttcaaagccgaaccaatggcgacttaccaggcttacgcagacaaagggctggcgctaaaggctgtcgaccaactgttcgtctcctgtatggtgaacggcgaattatatttattttccacctcttctacccaccgtccgcaaacggtgaactttgaccggactcctcttttcagcctgcaaacaggaaaaccggtagctattgccgttccacaggattaccagatcaagagcgacatcgcagttcgtttcaaagatggaaaagtgacgacatccactaaagaatctgtcggtaaagaattgatgccttatttcacaacaggtaacagcgaaaacgaacaaactgctcctttaaaggtggaaaacgggtatgcaacgatctcactgccggatgccggatatggcttctcccatctgccttatggctacctgaacagccagcggaaagaaaacctgctgatcccacgccctgtcaacgaagtctatacatacacgatcgaatgtcctgaaaatatggaactgcgcaccccggaaaccgacaagacgatccgcaatgccgccggtagcctgaccatctccgtcaagaaaaacggacgtacggcaaccgtcacccgtagcctggaactgaacaaacaactctatacacctgccgaatacaaggaattgcgccagcttttgacagaatggagcgacgtaaacggaaagactctattgttttcagtacgataaagacaattacttttaggatggccgatactgcctattatattaatgccgatatcagccatccccaaaaagccttgatcttttggtaagaggtgtcaaaatgtacttgtcccgtacttgacgcgggaacaagtacattttgagacaccaccaacagataaatcattaattaaacatctaaaataaatcaaatatgaaactactaaatctaaccgctgccctctttttaggaggtgttctgcaagcacaaaaccctttaccggccattcatccgcagccacaggaagttacattatctaccaaccggctgaaagcgcctcatggctttaccctttccggcatgcaacatccggatgaagatgccatgcgcctgatcagacaaactttgtcgataacagacaactccgaagcgctaccgctcaaaattacatcgctggaagaccggacacccgaactgaaacgttcaggagcctatctattagttatcacaccagaagaaatcgacattgcaatttccgacagtcgcggtcttttctacgcagcacagacattgcaacaattggcccaaaccgacggacaaggcaatacgacactgccactcggagttatcaaagactatcctgacgtcgcctaccgtggaaccgtcgaaggtttttacggcgatccctggagccataccgaccgcatcgagcagcttcgtttttatggaaagatgaagatgaacacctatatctacggaccgaaagacgatccttaccacagttccccaaactggcgcaagccttatccggaaaaggaagcagcacagatcaaggatctcgtgaaggaagccgccgccaacaaggtagacttcgtctgggcgatccatccgggcctggacatcaaatggacagatgaagaccggatgaatgtgctgaacaagttcggtatgatgtatgatttaggagtccgttccttcgcagtcttcttcgacgatatttccggtgaaggggccaaggcagacaaacaagccgacctgctcaacttcctgcaaaaggagtttatcgagaagaaagaaggcgtcagcccgctgattatgtgtccgaccgaatataaccgggcctgggcgggaagcgactatctggatgtgctgggcagaacgctcgacccggcgatccatgtgatgtggaccggcaacagcgtgatccatgatatcacactcgaagggcaggaatgggtgaacaaacgtattcagcgcccttcgtatgtctggtggaatttccctgtaagcgactactgccgcgaccacctgctgatgggaccgtcttacgggctcgatccgaatgcggcacatgccatgtccggtttcgtcgccaacccgatggaacgggcggaagcttccaaagtagccctttacggagttgccgattatgcctggaacatgaaagcctataatcccgaaagcgatttcgcagaagcctgccgttatgttttgccagaggcaccggaagcattccggacgttctgcgagaacaactgtgatcccggaccaaacggacaccgttaccgccgcgacgaatccatccgctatgccgaatctgccgaagcattcctccatgacttccgccagcacaactataatgcagatgccgctgaccggatgaaccgactgttcgccgagatcacagccgcccctgccgccatcgagacaagccgcaacaaggcgctgatagacgaaatcaaaccgtggctgatgcagttccacctgttagggaaagccggacaaaaggctatccgcactgccgaaaccggacaaggcgaggatcgtgccgccacctggcaatcgtatctgtcgctcacctcgttgctcgacagcatgcgcacgatcgaccggacctacaatcagaatccgtatcagaaaggcgtgaaagtcggctcacgagtcctgaccccgttcgtacaggagatacattcaggtgtcggaagcaacctgctgtttgcagaccagacagatgctgccacccagatgagtaaggcctctatcctgacggatatcgaacaattgaaatatcagccgttgaaggaaggcaaagaccagatcggatacaaccgcctgaacgaagtactgcgtatcgagccgggacagtccttcggccttacctgggaattgcagaaagaggctacctccttcaacttcagcctgccgaaaagcgaaaacagcggacgggtattcgaatggtccgccgacggcagacaatggacgactatcgccgacatccccgccgaccaagcccgcttcaaattggaaaagctcgctcccggagcacgctatatccgtatgcgtaatgcaactgacaagcagatgcaaatctacctgtacgaatttgccgtgacaacgaaagaagatacctccatcgaccccgtccgcctgatgtatgacaagaacctggaatctgtcaacacattgaccgcaagttcacgcatcacgattgataaggaaaaggagggttcgctcgaactgtacttgtccggctccccttgcagccaagttgtggtagaaggctcaccgttgaaagggaaagtgaaacaagtgctttactccggcccggcaaattatatcaagctgaaaaaagaagccttggagagtgtaaaggcattagaactatataacgcaggatcatcccctgtcaacatccacgagatcaattgacaaagaacaacggacaattgacaatcaaactgcaaaaacattcaattgtcaattgtccattctcaattgtcaatcgttcaatccatcggataccgcaccccccattcggagcgaagatcatccagcatctgcatgatgtgcaaagtttccgcatgcggcatacaaggcgtttcgatctttccctcacggatcgcgtcgatggaagcctgcacctgatactcgaaacccgttatctgtggcggacaggtatagcgagccacttcctcatgattgaccgaatagacgactgccaactgcgggttgttgatattatcgacgattatatatcctttatcccccgaaataactccctggcgatcgttcgcacagaaagcggtcatttgtaaaacagccatccgatgattccgatacacaaaagtaatgctgctctgcaaatccactcccgtctcccctttcacgcaggcagaagtaatccccgtaatttccgagccgaaaagcatccttgcaaagttgatcggataaacgccgatatccagcaaagcaccgccacaaagttccggtttggcgatgcgctccttctcggcaatcggatatccgatattggccgtcagcatcatcacgcgtccgatcgtcccgccgtcaaccagttcgcggagcgtctcggagaaaggcatataacgtgtccaaatcgcctcagtcaggaaaacctgtttttctttcgacaggcgtatcaacgtctccgcctgctctgcattggcggtaaatgctttttcacataagaccggcttacccttttcgaggcacatccgcgcctgctcaaaatggtgggaatgcggggtggcgatataaatcaactgtacttcgggatcatctgccaaatcctcgtatgatccgtaagcccgcgtaaagccccattcacaggcaaacccttcggcattttcctggttacgggaagcgactgcatacggttcaaccccttccatatcgcgcagcgtatgcgccattttgcgggcgatatgcccagctcctataattccgactttaaaacgttccattagctgtcattttttatcgggtaaatatacaataaaaattccatgcccatgaaacttttacttcacaagcatggaattcaaaagtgatcgcaatactatatcctactccataatcaccaccaccggattatcctcctcacccacctttttcaaggcggccacttcggcagggatatccgtttcaccggcgttatcctcgaaccaggagacgacttcttccgaagggagaatggcagcaaattcgcccgaagcggagacagatacaggctgtaagggaaggaagccattcgtatcgtcggttatcttgtcatcgagaggagaaaccctgacggctccgtccgccttccggtaaagggcattataagtcttctgtttgtcgttatagacattcgtcataaaacggaaaaggatcacatcttcgttttccatgaactttgtcgggtagatagcatctttcttatcctcgaaacgctcgttgtaagaccaactgtagacacctaaatccagcacgcgaacaggttgcagctctttcgctaccgacacccgatagatcgtatcattataagactggcggaaataaagatccttgcccgcatgccagaaacaactgttgccaagcggataaatggcagacctgccatccttatattttatgaacgccaaaccatctcccccatctttcaagaccgagatggaaacaatatcgtccggagtgatcgccttgtctccttcctgcccgaccggtaacgattccacacggacaatctcatctccacggaacagagcgatacgggccggcaaactgtcggtagccgaataataaccagcgataagatccgcatccagatagtcgaacactcccattgccggaaactcatcgacggaaaccgaaggagtccagatatggtcgaatcgaccgtccgccccgtaaacaacgatttcatttttccagccatgaaaacttaattggccggtatacgggttctgccatcctccgtagacatccgaatagccttcaggatcttcccccacatgcccgaccgaacggataaagcgacccgtttttttgtcgaatagctggcagcggtcccgaccggatgtcacaacaatccaatcattcaggatagttgcatacgctccctgccccaccaggcaactatcggtcgtttccaaggcgacatagcgtattttcttgaaacagtcggaagtcttcaactccgtctgattctcaaaagcaactcccaaaggaatcgcttcgagttttgccacctttgtttcccctccgtcactgcaagcagcaagaaaaagacatgccactgccacaaacacatgatttttcatacgattttcattttactttagaagaggcttttttcgttgtgatcaggatcacgcctctgactgctttttttccgtacatttcgatggcgctcttatctttcattatcgatatcgattcgatttcgtttggatcgaccttgtccagtccacccgtatattcgacaccgtcaatcatgacaagcgggtccggcttggcataccggacacctccggcaggacgcatattcgatttaaattccagaggacgcaagagaggcttgtctttttttgtttgcgacatctttttgtcctgtcgggatgtgaggacttcggcaaactccacttcggagatattttccaaccggcgggaaatttcaggacgggcgaacgcagcaacggcaacggctgcaagaggaagcacataaaggaacttcaagcgagcccaggggttcgatttttgttttaacatcatagtaatccgctttttaagtttactgtggtcgaaactgttggccatagaagtaaaacgctgtgctccgaccgctttctttattaataacaattgataatgctttgcatccacgccatgtgcgatcacactctcgtccgcctcatactcatgcacgttctgcagttcctgcttgagcagccaaacagcaggattgaaccaatgcaggacggcacaacatccggcaaaccacatatccaatgaatggcaagctctgatatgcgcctgttcatgcgccaggatttcagctccgctctcttccatatcgatgcgggagataacaatatatttcatccaactgaaaggcgggaccgtcaggtcggtcacgacaagccgcgtaccatcttccaatacggcccgctcgcccgaacgtatcagacgcacgatctggcagacggaatagaggaaccgtcctgcaaaaaagaggcatccgccggcgtagatcataaacaaggccgccaaccaagacggaaagcgactctcttcttccacaggagttccgcccatttgcaagaaccgttcgagttccaacgccgtacgttgtacggcgaccggctcatcggcggcaagctgtacaaaaggaatcgcgattgaaaaaactatcacaccaagaagagccatccgattgaaacggtggaacgtatcccggctcaaaagcaggcgatagaacagatagaacactgccagacagcaggtggattttattatgaatactaaaaatgctcccacgttgaaagaattaaaattaataataatgaatcccccccctcttaatcatcaattgtcgattgcctgttgtcaattgattctatcagctccttcagttcctccaccgaaatctcctcctccttcaccagcgaagagataacaccgaggtaggaattgttgaaatacttggcaatgacgtttttcaacgtgctccggctataatcggcttctgtcaccgcagcataatattggtaggtattgccaaacgtatgatgtgccagaaaacctttctcctccaatccgcgtacgatcgtggaaagggtgttgaaatgcggcctcggctcatcgtaaaactcaagcagttgtttgacgaacaaagggcctttcgtccagaaatagcccatgatttcttcttctcttgcagtcagtcgtttcatgatatcttgtttgttcggggcaaatataactaaaaaaaatagtttgcaaactatttcaattagtttatgaactattttttttagtggaacaggagttgtaaaaagtaaaaaatcctgtccgaagttcggacagaacttcaagagtcctaaaaacgctgtccgatctccggatcgcatttcaaaaacaccaaaagtccggtccgggcttcggacaaaacctcgaaaatcctcaagataccatccgagcttcggatcatatcacaagaagatttgaagtccttgccgaaatccggaacgtatttttcgagtatttcaaatcatttccgaaataaatgagattatttgatagactgtgaaaattaatgactatctttcgaatcaattaattacaatcaataatagaacaacatgaaaaaaattatccggattctaaatctagacattcattccctgaataatgccgaatacaaaaacttcatggagcgcttcttcaaactgatcccgctcaaggctgtatcaggagagggagaccgccccagtgaactccgcctcttgggcgaagaagaaaacatgacatcggatttcgtagggatcagcgatgaggacaaggcgacattcaatgccgacatgcttctcctgacagatgtcgtcaaccagtcgcgcacgaacgacaacacggctctgctgctcaatctcgacaagcgtcgcgatccgttggtttcattcatcatcaacacgacctccatcggacgtaaaagttcgaatcctgcatatgcacaagcatgcatcagcttgtataatatcttgaaaccgtatcgcggcatacaaaacattccgatgcaacaggaaaccgcacagatcaaaggcatgctctacgatctcgacaaaccggaaaacaaacagaagataacgcttctgcatctcgacgacaccgtctccgagttgcgcaacgtaaatgacgaattcgacgcattgtccagcgacagaaccaacgaacgggcgatcaatgcagtcgggacggcgaaggaaatacgccaccgcctcaactcgcaatacgactatatcactaccaccatctttgcccacagcattgcggtcccgtcggacgaggcaacgcttttcatcacgcaactcaaccagctgatcgatgaaacccgcaccgcctacaacctgcgcaaaggtatcaccgcatccaataagaacaaagggcagggcggcaatgacgaacgtccgggcgaactttaagccctctcatcccttctgcaacagataacccatacaagcacgaaccgacatggtttacaacaacaacccatgtcgatccgtgcttattttcacccttttcatacgcctccgaaggactatttcatgataagaattattaaaatacttattgataacattttttaataggcactgaacatttccctttttccgagctgtttacctccacaccacctccccatccatccctggaataacatcggaggacagagcaatctcatccaattgcaaatccaagggggacgaaaaataaaatcgtaattctctataataatcaagcagaacttttgcatcggaaaaacaccagctcccgctcccctttgccgcaatcgccactacacacctccccccctgccgcagaactttttaagttaagaaacggattaatccgcatttccttccggctcccagagtcgtaaacaaatcaaaacagctcttggttattgaatgcaaaatcgtatctttcagtcacaaatcccgaacatctcattgaaaaggcgatcaggtatggaggtaaaaaccaattcatcggagtaggaatctagacattattattgctatagggaattggaaattataaattcacgcccttattaaattctcaaaacctgcgaataaataagagcttttttaatgaaatgaatcgggtttttcatatatgttttctatctttgtcgtggtaattggaccttgaagcgtcaaggaaacattattttatgatttatataaaaagcgttttggtttatccttaagtagaaatctagacaatttcaagccatagaagggtcataaacaaaaatgctcatgtttcgattatatacccaatgtatatagcataagggcgtgagcaaactgttgtatagtactgcatggcgggttgtctagaacctctacttaagtccgaacaacagtcctcacgctttttcattttataatacgcccgattttggaggactaccggacaatttaacaaaaatgcctatgaattaataagataatatttttttcccacaataagcgattttagtattatccctaagtagaaatctagacaatttcaagccatccgggagaagtagctaaacaatgagttccttacgttttatcgtatctgtaaagcgtgggctatgtttatacttatcaggattagcgatagtattaaagacaacagtcccgcgctttttcatcttagacaaatccacccggggacagggtacggaaagaaaaacaataacgataaaacaactattatatgactacaaaaagagctctaatcaaggaattggcacaacggatggaatgtacggacgttgccgcgaagaagtttctgaattcatacatcgaactaataaccgaaaaactttcagaaggtgaaggggtgagcattcattattttggcaaactggttccccattaccaaacagagcgtccgggacgtaaccttcgtacaggtgaagaatgtaaaatacgcgcccgcacatcagtaaaattcaaagccagtgaaatactgattcaaaaactgaatcctggaaaataaaacaaaaagagtgcaccgaaatccggcgcactctttttgttttatcgtttcgggatatctaccgatgtttcctgttcacccaataagtggcgggagaaatagtcgaccatacgccagtagaaatattcgtccatatcgccgaagccgtggcgttgctgcggaaggagcaacatgtcaaaacgctttccggcacggatcagggcatctgccacacgcagcgtattgcccggatggacattgttgtcgatgtcaccatgtacgagcatcaaatgacctttcagccggcttgcgatctcttcgttcgtcttgatgttgtagacgaaagtcgtatcacccttttcgctgaccacttccttcacgccatgatgcgtctcgctccaccaacggttatagatgcggttatcatggtttccggcacacgagacggctgccttgaagaagtcgggatattgcagtatagcagccgtagacataaagccgccacccgaatggccgtggataccgacacggttgatgtctatgaatgaatagcggttggccagttgctcgatagccgctttctgatctgccaacccataatcgcgcaagttgccatagccgaagttatgataccatttcgaacggctcggatgtccgccccggtttccgaccgtgatcacgataaagccggcctgtgccagacgatccgtgcgcacactcatacggctgaacggataaacggttgcttcgacttgcgggcccggatatacataatcgatgatcggatacagggccgtcgaatcgaaattaaacggtttatacatcacaccatagaggtcggtcacgccatccgcagctttcaccttgaaaggttcggggaactggtaaccggcagccagcaacccagagaagtcgctctcttcaagcgtcatcagcttgcggccgttactatccatcaaatccgtacgcgggatagtgttcacacgtgaataattattgaccacgaaggccgcattgtcatccatgctgactgtgtggaaatagtcgcccggagtgacttgctgcaaaccacttccatcgaggcccacacgatacaggtgttcgtagtagggattctcatctttctctttcccgttagccaggaagtaaacgacacgtttggcttcgtccactttcacgatctggtctacatgccaggggccgcgtgtgatgcggttcttcaggttaccttctccgtcatagaggtacaggtgcgcccagccgtcacgttcgctccactggatcaactccttgccatcacctacggctgccaacgggcggacttcctgataagtattcatacgttcctcgataatcggacagatcgaatcctgtccgaccgtatacgaacagatatcgatacggtgcaggtcgcgactcgaacgggtaacgaagaaacggttattgtcgcccagccagacactcgccacctctttccgatcacggtctttctgcctccacggcctacgtgccaagcgcaatgtctgatctttgaatgcagatgtgcagatttccttgtagctgttgtcgttcatgtcgaacaagaatagatgctggacaggcgcttccttctcaccgggcatctggtatttataggtttccagcgtcggacgaggcgaagccatagagttgattacccacaagtctttcacggcacgctcgtcttcaaccgtcacggcaaaatagcgggaatcgggtgaccagacaatcccccaaacacctttccgcttgccgttgcaaagcgtgtcggtgttcagcaagctatagggctggccgaaaccaaagtctttcacaccgaaagtagtgagttgtatatccgtaaccgtactatccttatcgtctttcttcaacttctcgtaatcctcgcgggacatccgatagaggttcaggtcttttgcatacacgactgttttgccgtcgggcgagaaagaggcccagtcgggatattccgtttctttcttcttttctttgagccaagtcagcttacgcgtgggatagtcgtaggagaaaaagaatatctctttcttcggacctttatccttgtcggtactgtcttttttagcctcttgcgaagaggtgatctggaaagtaaaagtgcgaccgtcctctccagcttcgagcttctggatgggtagttgctgggcagtgaacgggtctttgacgatctcggttatctgtgcggcaatatcgtcgaggtcaaaaagcggacgtttcgtcttcgccaccggatcgacgacataccagactttgccgttgccggtcttatattcataccagaaactactgcccttccggaaccagtgcggatcgacagatgtggagaaaagcatcgtgttcagcttctccttcgtgaaacgttcggcctggacgtatccggatagccgctccgcttcctgccctttcgcttccgtgccacagaacatcccggcacaaagcatcactaatagtagttgttttttcatttgacgttgtttatatataagttgttattgcagataaatcatcatttaactatgaatgattacataaataaaaaggctgcatataaagtattgacattatatacagcctctttcgtttgtttatttatattataccggaagagttccaccgatcaggataacaaccagcaaagccaaaattgcatacaattcggggaatacggccatcaccatagtagcaccgaacacattgtggccggctccaacgcctgcgataccatttgcacaaacctctgcctgacggatagaagagaacagacctgcaaaacccaacaccaggcctgcaccgaagatagcggtcgcattcaacattgtgatgctatcaactaaaaatttctgcatcatgaagtaacctacaaatccatacaatccctgagaagagggcaacgcgcttaatgcgatgtaagtacccagtgcatcgggatttttcttcattgctccgacaacggcattacccgcaatcgttaccccataactactaccgatgaaagtcagacctgtcatcaacgcaatacccagataagctaataaaattggttccataatgataattgttttaatttatttttttgttattgtttaatttacttttaataatagataaacatacctcgtttgcctatgctttcttaaaaggccggtactctttacctcctccttcaaattcggcatttttataatattcgacaaagataagacgtagaggatggacaagcgaactgatcgtacaaagcccgatgttgatagcatggccgaccaacaggatcagcaacatgcataccgcacgcaacacgatgttcatgccctccgtcatatctacggccaactggttgaatacaccccccaaaatcgcacctgtcaaaccgattgcaaacaaccggatatacgacaaggtgtcacccagcaatccggaagccatgttgtaggtattccaaagccctgtaccgaaattcaggaagatattctttcccggcgaattatacaggtaagctacaaccaagccgataaccgcaataccgataaagaccgtcttgacggtttcgggcaattgcaaattcagcatcggcagcccgaatgccagtgccaatgccgtaataacaaaaacccaggcaaaaggagcaatactatatttgacacctttttgcgctttcatcttaaaagcggcaaccgtctttccgaagataatctgaaccagaccgataacgattgagaaggtcatcaaattgtcactgcttacaaagtagtctttcactttcgataatgccgggacatcggccaatgcgatcccaaagaaagaacccgtacacgtaccgacgattatcgccgccaagcccaaatactggaacaaggtaagataaggtttgaagtccggattgactttccgcttgaagaacgagcaagccaataacactaacaaaccatatcctccgtctccgaagcacagtccgaagaagagcatgaagaagggagcaaaaagaggtgtcgggtcgaactcggtgtaattcggcaaggagaacatcttggtgatcggttcgtacaaccgattaaacttattatttttcaacttgatcggaacacgatccccatcctgtatatccaactcctggaaatagtaaccttctttttcaagggcgacctccatagccggagcctcttccgtcggaacaaaaccttccagcaacatcaacttatcgccggcttcgcgatccgtctgcaccagcgtattggaaaaattgaattcgttttggatattcttttccaactctaccaatgtattgtattgctcagctgcatactctttcaactgattgttcaataccttgatattatccagcaattgttccatcgcaagatgaagttttgccaatccccggtcgggcattttcggacgttcagcatcgatatcgattggcgttcccgtcttggtgaccgtcacgaaataggtaaccgactggaaattattgacaagaaaagcattgtactcttctccccatttaggttcgtatttggaagtcgggcaactaaaaaacgtcacgtcgaagccagcctttttcaaccgcctgatatttgcatagctgaactctccccagatatccatataagcgatatccttttccagcgaaactttcgctgcctgtaactgggcctgcttttcttgcatttcttccagcttgcctaccagcttcaatccttcggcttttgtcagtccgcgtgccggagcaacagtcacctctttcgtctgggaattcaagttcttgcaatagcggatcgctgtacttacctgtttccgttcggccagcaaagcctgtagttccgcattatccagaacagaattcgtttccttcacatgcacaacacccaattcgcggagagtcgtgaggaatgcatcatattctctatgatataccataaaggcatacttgctcatctttactatcatacttcagcctcctctttttcttctttcgctttacgcttttcctgattagcccgcatgatcttttgtgatgacttggagagactttcctcgtcttccatgaatcgtttcactttgcggatcgcatctttataacccggaatctgtaccttctcaaaaagattcactttctgagtggttttcttccgcgcatgctccaacaactccaacttcatacccgaaaactcagcttcgatgccggtacgcgccaacttcttcaacagttcgataccgtcggtaaaccaagcaggggcattgaacaggctgtaacggccgatctcgaattcgatctcgtccaacacagggaccactacaccggctatctttttggtagaaagagaaacatcccgtaccgcaatcagttcgggattaaactcgttccacaaagccatcatgttttcatagctctgtatctcctgttcaagctgaagttccaatttcgtcacttcatctttggtccgcttcacttcgatacgcagggcgctttccttacttttgatcgtcggcagggaacgctcacgcatcttcagttgcttttccaattgctgaagagaggttttattatattgaaactttattgccattttctatacatttatgatttctgattcataacttatgagtcgatgataattcataaattatgaatcagaattcttttatttcttccagtatttgtcgaccaacgcctgtttgatgttcacttcggcaggttcgaaatactcaccgaacaagtcccatgccacatcgagcatttcggtcgtatcgagattgacatcgatagccaatagcttttcggaataatcctttgcaaaagccaacgtacggttatcgtagtccgtcaggtcgaaaccgttctccatcttcgtcttcgcattggcggcatcggcatacaggcgaacggcagcattcatcacctgcggatgatcctcgcgtgtcttcttcccggtcaccaattgtttcagacgggacagacttcggaacgggtcgacgattaccttgccgacatcgctatccttacggaggtacaactgcccttcggtgatgtaacctgtattgtcaggcacagcatgcgtgatatcaccaccggacaaagtcgtcacggcaataatcgtgatcgaaccacaggcagggaactgaactgctttttcgtaaatcttagccaaatcggaatacaaggaacccggcatggagtccttcgacgggatctggtccatacggttggacacgatagccaaagcatccgcgtagttggtcatgtcggtaagcaacaccaacactttttcgttcttctgcacggcaaaatattcggccgcacataaggccatatcggggatcaggatacgttctacagaggggtcttccgtcgtattgataaagctgacgatacgatccagcgcaccggcattgctaaacgtattcttaaagaacaaatagtcgtcattcgtcatccccataccgcctaggataatcttatcggactgggcacgcaaggcaaccattgccattacctggttgaacggctggtcggggtcagcaaaaaacgggatcttctgtccagttaccaacgtattgttcaagtcgataccggcaatacccgtagcgatcagttcggaaggttgctgacgacgaaccggattcacagacggaccgccgatttcaacatctttgccttcgggaacaggaccgccatcgatcggatcaccatacgcgttgaagaaacggccggccaactggtccccgactttcaacgaaggcgcttttcccatgaacacgacttcggcattcgtacggataccttccgtaccggaaaagacctgcaaggtcacttcatcgccgataatctttaccacctgagccagcttgccgtcgacagaggccaactcgtcataccctactcccgtcgctttcagcgaacaggtagcttttgtaatctgggtaatctttgtatatatcttttgaaatgcttttgttgccatacactctattatttatcttcgcgctctgcaatcagtgcgtcaagttggtcgttaaacttcttgaactgttcgctctcatattcggaatagttcatctgcttaaagatgttgatcatcttcttaaagtattccattacttcgaggaaagtgttgaacttgaactcggcatgacaaatcttcacaaccttgttcagcataaactcctgacgcgcaagaggggttaccgcgtcgatcgcatcgaatgcatcctgttgcaggatcacgaagtcgatcagttccgatttccagaaaatcacgtgatattctacaggtacgccgtcgtcaccgaggatattgatctgttcggaaatttccttaccgcgcaacatacgagtcttgatctcgttcaccttgtcgatccaggtcggagagatatgtttggcaatatattcctggaattcgggatattccagatacttggaataactgtcgatcggattcacggccggataacgtttacggtcggcacgctcctgttccaaagcatagaaacaacgggccactttcttcgtattttccgtcacaggctctttcaggttaccaccggcaggcgataccgtaccgatgaaagttacggaacccgtttcaccattattcaaatgtacatagccggcacgtgcatagaagttagccacgattgcagacaagtccatcggaaacgcgtccggtccgggaagttcttccaagcggttggacatctcgcgcaaagcctgtgcccaacgggaagtcgagtcagccattaaaagcaccttcaatcccatgctcctgtaatactcggcgatcgtcatagccgtatatacggatgcttcacgggcagccacaggcatgtttgacgtattcgcgataatgatggtacgctccatcaacttacggcccgtatgcgggtcgatcagttccgggaactcggtaaagatttccactacctcgttcgcacgctcgccgcaggcggcaatgattacgatatctgcctcagcctgtttggagatagcgtgctgaagcacggtctttccggttccgaacggtccggggataaatcctgtaccaccttctacgatcggatttaccgtatcgatcgtacggacacccgtttcgagcaacttataaggacgtggtttttctttgtaacaggtgatggcacgttttaccggccagcgttgtatcatcgtcacctccacatctttgccggtttcgtccgtcaagacggctatcacctctcctattgtatattgtcctgcttctttcaggctcttgaccgtatattctcctttgaaggtaaaaggaaccatgatcttgtgaggctggaaattttcgtccacttcacccaaccagccaccagcagtcaccttgtcacccactttggcaagaggtttgaaatcccacaacttatcattgtccaacgggaacgtatattctccacgcctgaggaaaacgccttccatcttatcgaggtcgttctgcaaaccatcgtagttgcgtgacaacatacccggtcccaacgttacctccaacatatgtccttcaaactcggcttcgtcacccacccgcataccgcgagtgctctcaaatacctgtacaaaagcattcttgcctattaccttaataacttccgccatcagcttcacgcctcctacggaaatgtaacagatctcattttgggaaaccggtccatccacctctacggtaacaaggttggagacgatcccttttacaattcctttcgtagccataacgtttaattaattaagaattaagaattaaaaaatcaagattgtgcgtcgaactcaatccttgaaaattccttactcctttatccttaactcttttattttttaatttttaattcttcatttttaattttccaaattcttccagggcatgctcgctgcctttcttcatcgctccgacgatctcacggaaagtcttttcaccggtcgccttatccagcatcacccagcgttcgatcatttccaacttcagcagataagcaaatacactctctatatcgaaaggcttaaagaatgtatgttcttcgagccattcccacttcaaaaggtccactttcttctcgcgaaccatcaaatccgtttcctcagcaatacgccagagatcaggcaaataatccaccgtgtctcccaacccgaaatcacgggcattggatgtacgaagcgcctgggctacttcattatctccgacgatatacccggctttatcgaaaccatgtttacggcaggtaatagcggtcaacatattgttgatattcaagtttaagcagaaccaatcgctgacgaacttattcgcatttttcatggcatacgcataatagagggctgccagacggtcttcccagggaatttcctgtttgttttctttgccttgtgcttcaagataaagcttgaaaaactctttgaaataaggaggcatccggtcattcttgggtggcttttcttcttccttcaacgctttgtaaagagcatcaaactcatcatacgttatacgtccccgtggatccggatcacgatccggttgtttggcatgagcaatcaggttcttattgtcgaatttgagaaagaacagatcgatcaacttcttatcggccttcgtcagtataccgtccaattcctgtctgaattgactgatggaataggtcaatttactatcatcgagcgcaatattggggagtcctgcgattaagcaataatatttacccatatcagaacagcatttctaccaatcctggacgaaggaattccttgaagaaagcaacaaactcgtcttctccgaaacttactttatacgaaccgtcagccgggacgattgtgaaagaagcatcatggccgctcactttttcaatcttcacacctccgtccaagaggcttttggcattggcttcaaaatatttggtgagagcatcggcatcggccgtccggatcgtaatcgcctccttcacaacccattcctttgccatttctaaaatcactttctgcataaatgcagtatcagaaacgatcgctttcacattggaggaagtaatttttcccgtaatgagatttaccacttcgctcttcagtgcttctacagattgggtagcaaacagcttcaactcagcttccgtattctttttcaactcggcggcctgcttttcagcctgtgccacaatacgctttgcttctgcttctgcttcagtcaaaatagcctgtttctgagcatttgcatcggcaatgattcgccctgcttcttcgttgcctttctctacaccttctttgtagattttgtcggtcagttcctgaatctttgtatccatttctatatattttttaagttgttcccacgtaagtattaaacgcctacaaagttattcttttctttgaattagcattcagtctatcctaaaaatttgcgattatacaatttttcacaccactggttagtcgggatggtcgccaccagcttgtgatagataacagataaaatacccttttcgcaaaacttttccaagtttgaattaaaaagtatcagaaccagaccatatttatcatatttatatattttgaaaaactactgtcatactatcactaatcgccttttatcaattgaatatcaaaggacaaaagcaatgatagtaggtatgatggatgccttttccatctatcatactgtcattaactgcctgtccgatatttttcttcacatgacttattttcaataacataataagataaacccattgacacccgggtctcgatatcattcacactcgggtgtcaagaccgttcacatccgggtgtaaaaagcctgtaaacgggaatcttcggcactttttctgcctgtttgaagcaaaataagtcacgtgtttcatgaaaaaagacggcatctcctacagaaaaacatcaatactactctcaaaaccaacaaatgctaaattcaaacaggctcttagcggcaagcatagcaagtaatattttttaacgttccaaatctattcaaaacagtcttttttctatcgaaatgacaattcgcattctatctttgcgtcacaattttttatcattcattgtaaatccaaaatatatgttttccatcgaaaaagcaacccttgccgattgtccccttatccagactctggcatccaatatctgggaaccgacctatggttccatcctctcccgcgaacaactcgactatatgttcgagatgatgtacagcaatgaaagccttcaaaagcaaatgagcgaacttcatcaccagttcttcatcatctatgccgacggtgtcccttccggctacttgtctatcgagaccgtagaaaaggatttatatgaattccaaaaaatatactctttgccttccctacacggttcgggaatcgggcgtttcattatcgaacagggaatagcctacctgaaaacgatccatccgagcccttttacgatagaactgaacgtaaaccgccacaacccagccgtaggtttctataagcatatgggatttcacgaacatgcaacccgtgatttccatatcgggaacggctattacatgaacgattacataatgagaatggaggtaaaggaatgaacgtacgcctaaaaccgatcatgtttgtcgggacttgttccgatgcaggcaaaagcgttatcaatgcagctttctgccgtatattcaagcaagacggatatcatccggcaccattcaaggcgcaaaatatgtcactcaactcctactccactcctgaaggtggagaaatgggacgtgcacaggtggtacaggccgaagcctgtgggatcgccccgcatacggatatgaacccggtgttgctgaaaccgacgaatgataaaagctcccaagtcgtcttgaacggccggccggtcggaaacatgtcggcacaggattatttcggtatgcaaaaccaaaaagaggtattattcaaagaagcgattgaagccttccatcgcctggaaagtcgctatagcccgatcgtcctggaaggagccggtagcatttccgaactaaacctgcgcgaccgagacatcaccaatatgcggatggccgagcaggcaggagcggccacctttttggttgccgacatagacagaggcggcgttttcggatctgtttacggaacaatcgcccttctgaagccggaagaaagagttttgatgaaagggatcattatcaataaattcaggggagatgcatctctttttgatgatggcaggaagattatcgaggacttgaccggtgtgccggtagtaggtgtgattccttggtttcgcgatatcaaaatcgaagaagaagattcggtcgccctcgatatgaaacacaatacttaccgggacggaaaaatcaacgtggcgatcatcttgctgaaacgaatgtctaatttcaccgacttcgacgtattggatatggaccctcgcttcaatgcctattatacgaacaatatcgacgagatagaaaaagcagatatcatcctgcttcccggctctaaaaatacactttcggatcttcaaagcctgagagcgtgcggtatagccgatgcaattatccgtgcccataaaaacgggaaaaaagttatcggcatctgtggagggtatcaaatgatgggagcacgccttgaggacccgaaagccatcgaaggaaacctgcccgccgttcccggactgggcctgctaccacaatgtacgatcatcgaaccggaaaaaataactcgccaaagcacctttgcctttctgcctgggctatgcaaggacggttcctgtaaaggcggttcgcgaaccatctcctacggctgtcgcggctacgagatacacatgggacgaacaactctgcttggcgacgctccagaaagtccggtggccgtcctcgacgacggacggacggacggttattatctggataacacatgctggggcagctatatgcacggaatactggataacccggaagtcctggacaacctggccgaaggatttgataaagaaacaacagaccaccctttcgactatgcagcattcaaagaagaacaatacgacaagttggcgaatttagtcaggaaacatgtcgatatggattatatctatcggcaactggtttgacaattgtcaattatttcaaccggtccaccctggcaacgtcatctagtttgacacagactgtagcccctaattgttcaaggtaaagaactaaatgattctttttaatcttctttacttttccggaaacatgtttcatggctccgcaaaggatctcgacctcttcgccggggcataaaacatgttcggatgcttggtcgagaaaatcctgaatggcatcgatctccttctggcggacaacggccggttttccattgtaatagacgatacgggccacgccatacactcgggtcagatttcttaactccgggtcggtacaccgtacaaacagataagagttaaataatggcaactccacgattttgacacggtcagaccagaccctgggcgcacgatgaagcggaagccaacactcgactccaagcgcatcgatccggtccctcacctgcttttccgccctgggagcggtatacaacacataccaacttgtcttatcggcgtttatcttaagttcttttttctccataacgtacacaaatatacgactatttttcatacatggaatggcccatattcaataaacctttatccattcccgaacgagccggattaatcttgttattttccctgaatatcaataattatctctgtacgaacaaatatacacactattcaagagaagacttatctgaatttctttgatgctgaacgtatgtatatcgacatcaatatatttcaaaagccgaatattccggaagacgatcagtaggaccatcatcgagagtttgaacgaggcaatcggggtcgactctgtaaaaggttccggttctactttctggttcacactaccactcgaataaaaacgcggtgtgcaaaacagtcttgttcccgtactccacataggatcacataaaacagaccatataaatatctgattgataagacctgttcttttgcctccctgtaggagcggagacaagtacattttgacacaccgcttttcattacttttgcatcggacccaccgatggcggaggatttccaatcccccatttcttatttgctttcggccccatcttcagagacaggacaccgccggcagtaatccggctatggtcaaaccaaggcccactcaactcttcgccgttcaacgtagccgattgcacatatttattatcatgggaagcgccatcagccacgatctcgaacacgttaccatcgccgagatcaatcttcacatccgaaaagaccggactaccgatattataagtcggagatcccggtgtcaccggataaaatcccatcatactaaacaccacgaaggcagacataccgccaccgtcttcatcacccggaactcccatcaggtcgttacggaaccactggtcaagcaggacacggatgcgtttctgcgtcttccaaggttgtccggcataattatacagatacgggatatgcaggctcggttcatttgccatcgagaacattccgacattaccggtatgatcaggcaaaaacgagtagaattgccacttggacattcctaaaggagtatcaaacatcgaatcgagagcagccgtaaagacctcgtttcctccgataagcgaaaccaagtcgccgatattgtgttgtacatcccaacgataaatataaccattattttcatcataataatcgcgagcacccaaaccaccagaataccgataatccacaccttcgataaacttaccgtccttatccttcggatggaagaaacgggtttccggattaaagaggttccggtagttataagaccgggcaaggaaatattccgcatcctctttcttacccagttcggccgcgatctgagaaagacaccattcgtcataagccgttcctaaggtaacggcaaccggttggcgtttttcccacggagagacatcagccaccgtttctttttcacccggtttcaaagccggaatatagccatgttccttataaaattcatccaaccatccggaaggagccgccgaccaggggatcaacgttttctcttcgatacccttacgggctgcttcatatgctttttcaagatcgaaaccacgaacacctttccgccaagcatcgataacagtggcaacggcatggttggagttcatacggcgggagtcaccggtcacttcagggaatgtcggcatccagttcgtccccatctgctgggccatcaagagatatgaattgataatatcggtctcacgttctttatcgattaggatacgaagcggatgggtagcacgataggtatcccaaatccagtcgtcggtatagaacgaacggccaccgtcttcatgtatcttgccatcaaaagcactatagtatttaccgtcttcgctcagattcaccggacgttcataacaacggtataaggaagtatagaaaacggtcttgtcgttttcacttcctccacttacctgtatcttgcctaaagcatcgttccattcgtttcgtccgatccgggcgattgcacttacatcatatgagttgatctcacgctccaggttcttccgggcttgttctgtgctaataaaagagattccatagcgcacaccgatctctttctgaccggagaaagccaatgccaaggcggcatcttttccctctacggacgatttaccgtacttcacggtttcactggtcaggacaccggatttctccggtgtcttgtctgtttcggcatataaatagacctttgttttcttatctacatattgaaaaccactgacagtgtttccatcacatttcaactctccattccgactattgaacaccagataagccggtccgtctttctcgaacgtaaggctataaaccgcgctctggtgagatggagcataatcgacctcgatattcgcctcatccaaatatacctgatatcgatacgggacaatcttttcccgatcgtaactatactggataacaggtttcagacccgcctcatcaccctgataaggactcaggttgaaagccgaactacctcgatggcttgtcacgatgagaggcaacccacccaaccggtctcccgtaaaatcaccacgttcgggatagacacgcaacatactgttaggcagatggacggtcggataagtcggcaccaacagatggctgatgttccccatataagggttaacatattctaccggttctttcggcaggttatcggcgatcaaccgttttcctttgacataatacctatcggcaaacatcatgatggcaactccgatcacgacgcccaataaaaattttcctgttttctttagtatctccattgtttatttcttttgtttttcatttactgaaaatgaatatggaaaatcttccggactcactcctctgttcatattcggctcatctcccattttgatatccaagacaccgcctttcagcagttcgaaatgttccagatagtttttcgtataattctttccgttaaaagacatagactcgatatagatattcttgtcgctgttctccggtgcattgacaaccaagctctttccattttcaaaatgcaaagtggctttcttaaacaaaggtgcgcccaatacatattgtgtcgttccgggagcaaccggataaaagccaagagcagagaatacataccaggcggaagtctgtccgttatcttcgtcaccacaatagccatccggtgtcggagtgtacatacggtccatcacctgacgtagccagtattgggctttccaaggctcaccggcataattgtacagataaatcatatgctggatcggctggttgccatgtgcatagtttcccatattcataatctgcatttcacgaatctcatggataacctgtccataataactatcatcaaatacgggaggaacagcaaatacggaatccagcatagtgatgaattcttttcgtccccccatcaaatcgatcaatccctgcggatcgtgaaaaaccgaccatgtataatgccagctattcccttctgtaaaagcatctccccatttcaacggcgagaaaggagtcatgaagttgccgtccttattctttccgcgcatcaatttggtctccttatcaaacaagtttttatagttcattgcacgtttggcatacaaatccagttcttttttgggacgtcccagatcttttgcaatctggtagatacaccaatcattataggcatattccaacgtacgagcagcattctcgttaatctttacatcataaggcacatagcccaatttgttgtaatattcatgtcctaagcggccggtggaagaaaccgtcggatgtacattttccgttccgtggatcaaacctttgtacaatgtttcgagatcatccacctttatacctttgacataagcatccaccaaaaccgaagcggaattgttgcccaccatacaaccacgatgtccgggacttgcccattcggggaagaaaccgctttccttataagcattgatcaaaccttcctgcatttctttcgacatggtcggatacatcaggttcaggaacgggaacagactacggaaagtatcccagaaaccagtatccgtaaacatatagcccggcaatacttttccattataaggactataatgtacaactttccctaaggcgtctatttcataaaacttacggggaaacagaagcgaacggtacatgcaggaatagaacgtccgatactggtccagagtgccaccttccacttcgatcttactcaactccttattccaaacatctttgcctttttgtaccaatgtgtcaaaattgtcagaacccaactctttcagattgagcgaagcttgttcgaaactgataaacgaagaagcgacctttgcatgtacaatctcgcctttcgtcgtcttaaaaccgataacggcaccgacatggtcggattgttgctcacgaacaccttccttcaaagttgcatcggcaaaagttgcttcataagtgaaaggtttatcaaattcgataacgaaatagtttttgaaattatccggtacaccaccgctattcttggtcgtataaccgataaccttgttttcttcagggatcactttgatataggagcctttgtcaaacgcatccactacgacataggaatgttcgttttccgggaaagtgaaacgaaacatggcagcacgatcagtcggtgtcagttcggttttcacatcatgctctgccagatagacttcatagtagtacggttttgctatctcactcttatgagagaaccaactggcccgtctatcctgatcaaattcaggagtaccgacaaccggcatgatggcaaactgcccgtaatcattgatccagggacttggctgatgggtttgtttaaagccacgtatcttattggcggtataggtatacccccatccatcccccatcttaccggtttgcggggtccaaaaattcatgccccaaggacgtgctatagccggataggtgttaccggttgatagctcaaacgacgattgcgtccccattaaaggattaacaaactctaccgggtcaaaagcaccgtctgacgcaacggcaggccttcccaggcaggttagcatagcaataagagcaaaagcccatatactttttttcttcatttttatttatacgattaatattctacttacaaagataagtcaaacaactccttaagtaaaagcaagtaatgtggatttttctcaaaaatcaataaaaagggaggttacccatctatgaacaacctcccttctgatcaaaactgctttttaatgagtcctgatatcaactctatagtttgaacttatacagttgcgccatcaccttctggtactcattctgcaactgcatatgattctgcatactctgatagagcgtggtgacgtctacaaaatattcgatcatcgagatttgtcccgcttggatcgccttattcaacaacgccaggttattctggctctccagcacttcgccatactcgtcgatggaagtcttcaaggctaccgactggttatagagttggagcaattcattctctaccgccgtcatcgtgctttccagttgcaaatcggtgtaaaggttctgtgctttcgcctgtttcacattgttgcggtttgagaaaagaggaatactgatgccgaccaaaaagccattgaaacgttcgccacccgaagatgggttcatacggtaacccaactcaaacgaaggcagccccatcgtcttgttgacactgatttgtctcgatgatacggccttcgcactttgcaaagacaacagacgccgatcattttccaagatttcctggcgcaggtcggcaaacgagagcggaagctccacaacctcgtaagccgtatcagtcaactgaatagcaatccccccgttcagcatttctagttcccgctgtttatttacacgggccgcttcgttcatgcgtacctcgttacggacgttcaaaagttcaagttcgatcttgttcgtttccaaaatattggcatcaccctgttccaagcgttgctgatagagtgcggcaagctgttcggcgcttttccgacggatatccagcaggttcttttgctgattcagaaagatcaagtccaggcaagcttctttggcttgcaacaaaatctgctggcgcacttcttcgccctgtcggtcgtagttttcgcccttctgcttggagagtttgttccgttgcatatataaagacgggaagtcaaatgattgcgaagcgactaattcaccggtaaatcccattccctctttgtttccatacaaatgggaataagtaacggtaggatcaggcaggttgttgtccagtttggcttccaacttttgtgccgtcaccatctgacggtttgcctgcaattccttgttattggtctctacactccggagcacttcctcgatggaagtttgcgccccggccaccaatgcagaagaaagcaatgctattgttaatatgaatcgtttcattctttatcttctttattcattaataaataaacaatcgggatgatgaagccgttcaggaaagtggatgtcagcagacctcctaagataacggtcgccatcggactttgtatctcgttgcctggcaaatcgccgttcagcgcaagcgggattaacgcgagagccgaactgagcgccgtcatcaggataggattcaaacggtccatagaaccttgcaggacggcttgtttcaacggtacattctctacagtccgaagatgcgtgtaatggctgatcagcaacataccgttacgagtggcaataccgaacagggaaatgaaaccgataatagccggaatactcacctcgccggaagtcagcttcaagataaacacgcccccgatcaacgccaacggtaggttcaacagaataaccccgctctctttcgcattcttaaactcattatagagcaacaggaagatcaccaacagagacatcaacgaagtaagcagtaacgtacggctggcagcctgttcactctcgaactgcccgccatattcgatatgatagccttcaggcaactggatggaagcatctatcttctgctgtatctcattgacgatgctgcggaggtcgcgctcggaaacattaccactgatcacgatcttacgctgcacattctcgcgattgatcgtgttcggacctgtcacggaacggatttcggcgacatagctcaacgggactttcttaccacccgcatcgatcatcagattacggatatcctccattgtggcacggctttcatccgaagtctttaccgtcaggtcaaatgtcttgccattgtcatacacctggctgacagcttcgccccccagcatgacattgacatactcctcaaactccggcaacgtgatgccatattgtgccatcaactcacgcttcggtgtaatggtaagctgcggacgctcgatctgttgttccactttcaagtccaccagaccggggattccttgtatagcctccttgatctggttaccgaccgtaaacatcagattcaagtccgtaccgaacaatttgattgcaatattcgcctccgtaccggagagcatggcgtcgatacgatgagaaataggctgtcctatttcgatgttagctccactaatggtagacaatttcttacggacatcattcataaccgcatcgcggctacggtctttcaagacaaacggagcttcgatttccgatacgtttacccctaaagcatgctcgtcaagctcggcacgtccggtcttgcgggcaacagtctggatttcgggaacctgcatcagcaattcttctgcccgtcgtcccatctcatccgattcttcgagggaaatgcccggaagagaacttacattgatcgtaaacgaaccttcgttaaatggcggcaggaagctacgtcccagcgtaaagaacattcccaatgcaacaagaaacaggccaatcgtacaccctaacaccatatttttatgtgccaatgctccattcaaggctttgccatacaaatctttcaacttgcgggccacccatgcctccttctctactttcttgtctgtaggcttccggttcaacaggtagctgcacaacacaggagtcaatgtcaacgccacgaccgtagaggcaaacagcgcaacaataaaggcgatccccagcggcaccagcatacgcccttccatcccgctcaggaagaaaaggggcacgaagctgaccacgataatgagcgtcgaattcaaaatcggcatacgtacttcgcgagatgcatcgaacacaacttccaaaatggaacgttgctgatcggaaggcaacaaatgattttcccgtatccgtttatatacattctccacatcaacaatcgcatcatcgaccaacgaaccgatagcaatcgccatccctcccaaactcatggtattaatagtcaatcccatataatgcaatgtcaatatggaaactaacaaggaaagaggcaaggcaaccagcgaaatcaccgttgtacggatattcatcaggaacaggaacagaacaataacaacaaagaaactgccttcgaacagactgttcttcacattatcaatagagctgtcaataaagcggctctgacggaatatgtcggtcgaaacgtgcacatcagcaggcaggttcttctgcaagtctgccataatcgcgtctaacttttccgtcaagtcgatcgtactggtgttcggctgtttcgtgaccgtaatcaacacggcaggtttcgcccgttcggaagcagttccaagcttcggacttttgctgccaatcttcactgttgcgatattttccaataaaacggggaaatctccgacaatcttgacaactccctttccgatctcctcggcattcgcagtagaaagaacacccctgatgatgtattcattatcatattcataaaggacaccaccattggcattccggttcatgttgcgggtaacggccagtacttcacccaagcttacaccgtagtgcttcatgcgggtgggatcaagcaatatctggtactccttgatatcgccaccgatcacggcaacctgtgccactcctcccgtcgagagtaatcgcggacggatggtccagtcggcaatcgtacgcaagtccatttgggttgtaggggcgattcgtgaaccactcttactatcatcaaccgtcagcccgataatcatcatttcccctaaaatggaagactgcgggcccagcgtcggtttcccgacattctccggcaggctctcactgacgacagccaacttttcggaaacgatctgacgggcccggtaaatatccgttccccaatcgaattcaacccacacgacagaaaaacctgtcgtagaagacgaacggacacggcgcacatccatcgcaccattcacagccgtctctaccggaaaagtaaccagacgttctacctcttctggcgccataccatttgcctccgtcataatgacaacggtcggcgcattcaaatccggaaacacatccacatctgtatggaaagcggtatacgtaccggcaatcatcagcagcaaggaacagatcaatacaaccaacctgttatgcagcgagtaatatattatcttattcagcataatcttttttaattgtcaattcattaatgattatgtgtatgtgcgggaattgcattagaagcagaagccagcttgatctggtaagcaccgaccgtcacaacttcgtcacctgctttcaggccgctcaatatctggacttcggagccgttgtcggcacctaatgtcacaggaacctttttataggcttcttcatgcacgcgaacaaagactgaataaacaccctgctcctcgataagggcggaaacagggacactgatgacattctgcatcggagccgtaagcagatagatctcgacaaacgagccgggaataatagctcccttattatcaaactcgaatgtaaccggaacataaaaagagttagtatcggaggccttgccataagaaagcagacgtccacgcagatcggacagtttataagtcacgttatcgtacggcgtacggaaattagcggactgtatagatggcaagtagttgtaatatttctctgaaacctccgcacgcaacaccaggcggccattctgcgaaatcgtggccaacggctggcctaccgtcacataatcaccctctttcacttgcaagtttttcagataaccgtttattggcgaaacgaccgacaccccgttagcagtctgttttcctgctaccgcttcccaagccaccttcgcattctcgtaattcagacgtgcctgttcaaaatctttggcagaaacgatcttatcccctaccagggtttccatacgttcatattctttctttgcattctcatacgcatatttggctttagccgccacattaccgtcagacaaactgctcgaagcaagactcagaatagcctgtcccttgcgaacagctgttccatcgacaaatgacaggttgccgaatgttaccacaccgggaaccgtagccaccacagtcgactcctctccctgcgcagccatcacccgcccgcttgttttgatcacatcggtaaaaacacccggctcaaccttagacgtctgcaatccgactgcttccgccaatgctttcttaaacgaaatttcaccggcatgtccttctccggtctcttcatgttcatgatcatgtccctcatgttcatggtcatgcccttcgtgatcgtggtcgtgtccttcttcgtgttcgtgggcttcatgttcatgctctccatgtgccgcagtattgccattgcaacctgccaggatgtaggcgaaaatcacccacactaaatatatttttttcattatgatgtatgaattttgatttatgagttatgaataaaagaaggttcatgatttatgatttatatcatcaacacataaatcataaatcataaattataaatcaaattcatacggaggcgcacgaagccctgacgcagaaacaatccacgtatcatgcagggactcgatgtagtaggcccggtcattctcgaacaagagcttgtaaaagaccggaacaggagggtttatataatcaaacaatacaagcaaagggaaaagaaactgattcacgtttccatctgtcacatgcgagaaaatggaagtgtagagtgcgatgttatgcccgttgcatccgcaatcatgtgattcggaacttccatgcccaccatgagccgcctcggctgaaagtgatttatagcaaggcaacccgttactatggtgatgatgcggtacgactaccgacataagcatcacgatactaacaagcagcatcacatattggtatattttctttttcactctcatacttccgatacaaaaatacgaagttttttaattactacgcaattatgcttcctaaattaagaaactgttttgtttttcaccaaaccaggcggttttcattgtctggcaaggcactttagttgccagacacccccatgttgccaccctttacatccgggtgaagaggggggggtacacccggatgtaaagggtggcaacatgggggtgttcgtgaaattatgtgcttatttctgccaaaaaaagagatagcttttgtggaatgaagaaccatattgtttttcaatcatatgataaaagctccatatttcatgagtgacaaaggagtgacagagtagtgatagagtagtgatagaggaaaatgtcatctatcactacctctaacgtttaaatatcaataactacaggctcgtcagtgatagagtgatagatgaaaacagtttctatgatttctcccgatagagaagaaaggtatgccaagtgaaaacttacttacgaaatgacataaatcaggcatggatataaacccatataatccatgcctaaaaaatcgtgatgaagatgtgttttgacatctccttgttattcggaaataagcctttatttgtccagcttagcacaaataagttcggccgccttcttaccgctcatcagcataccgccaaagatcggccccatgcggaaactaccactcaccccattggcagccataccagaaacgaacagtcccggatagatttccttcgtattttctacggttgtagactcacccagctcgacattcagcgaacgttcgccgatcacgcccccagtcggagtattcagcttgatatcgtttttgcgagccaccacgcgtgcgatttcacagtcgtggccggttccttccaggacagccttggacatgattgtcagcgggtccacatgcataccttcgcggataaccggagcccagtttaccaccactccggctacagcatcgttatggaacactacatcttctacggaatagcagttgaaaatagtcgcaccggctttcgtcgcaccatagatcaaagccgaggtcgtgtgtacggaatccatgatataagtaccgtttccggcatccttataacttacacccaactcacgcacgatcggcatagcctcttcctgaaccacgatatcgttgaacatcatggcgcccccccacatacctccaccgggggccagcttacggtcgaacaaagccaccttctttccggccttagccagataataagcggctacgataccagaaggaccaccaccgacaatagcgacatcaatagacaaattgctctttaacttcgcaaagtaagagtcgataattcctgttgaaacaatctgttccattacaaaataataattagagtttaaacatcgggaagcacatagaggtaacgcttccctttatttagtaattctaccttttcccttcacggcgttatccggcaggttcaatgggtataatctcagcctgtatagtaaggcacccctatgataagtcgaaggcaaagatataataattatccgaaatgcggcggacgcttgtccattttccgttccacaaaattcttcatgaacgcaaccgtctcgtctatccccaacacagagacatctatcgaaaagttgtaggtggatgcaacgccccattccttattcgtataatagttataataagcagcacgcgacttgtcggtcttcagcatcaattcctccgcctgttcgaccgtcaggttctggctttcgatgatccgttgaatacggttttccttgttgttatgaataaagaaactcaggcagtcaggattgtcacgaaggatatagtcggcacatcgtccgacaatcacacaagaacctttttccgccaggttacggatcgtatcgctctgatacaggaacaaacggtcgttagacagtacatcggcatacggcgggaacaaccccatatacgaatagcccatcgtaaaagcatacgccaaaccactggaagccttctcgtccgctttctcgaaaaactcctcgctcagtccgctttccttcgcggcaagcgccatcagttccttgtcataatagccgatgcccagctcttttgccagcttctgtcctacctcgcgaccaccgctgccaaactgccggccgatggtcaatatgattttattatccatgtctatctatgtttttggtatcaagacaaaggtaaataaaatttatttagaatgaaacttcctgaactggtttatcaagacgagagccgtaacaatcgtagctgtcgtgtcggcgatcgggatgctgatccatacgccaagtgttccgaaccatcggggaagaatcaacaagcagggaacgaggaacagcatctgccgggtgagcgaaagaaagatcgccttcttagacatcccgatggaaaggaaaaagtttgtcgccaccatctggaaaccgacaatcggaaagaccgcaaagacgatatgcaaaccgtacaccgccgcctcgatcagctccggatcggtcgtaaacatgcggacgatcaccgacgggaacaactgacagagcaaaaaccctgttgtcgccacccctatcgcccacttcatcgtcaacttcgtcacttccgtcacacgcgaatattggcgggcaccgaagttataaccggcaatcggctgcatcccctggttgaaccccatgatgatcataataaagaggaataccacccggttcacgatcccgtatgcgccgatcgccatatcgccgccatgctctttcagtccccggttaatcagtattacgatcagacaggcacaaagattcatcaggaaaggtgacattccgatataaagaatccccttcacgatttcgcttttcagccggtaaatgcctttcttgaaatgcaacaactccttcggacgggaaaaatgaatcaactgtccggtcagcgaaatgacctgagagatgacggtagcccatgccgatcccttgatcccccaaccgaaaccgaagataaaaagcggattcagtacacagttgatcaccaccgacgccaacgtcgcatacatcgctaatttagggaaaccggaagaacgcaacaccgcattcagtcctagatacatatgagtaatcacatttcctatcaggatcacattcatataatcgcgggcatacaaaatcgtgttctcgctcgccccgaagaaatagaggatcggatcgagcaacaacataaagaccaacgtaaatgcgagtcccaaaactacgttcagcaccagtacgtttccgagcaccttgttcgccccttcataatctttctgtcccaacttcacggacaccagcgttgaagcccccaccccaaccagagaaccgaaagcagccgcaaggttcatcaatggaaaagtcaaggccaagccggagatcgccaacggtcctaccccgtgtccgataaatatactgtctgccatattgtagagcgaagaagcggtcatggcgataatggccggtatggcatactgtgtcaacaacttgctgatgcgctcggttccaagcactaaaggagaattttgtttactcatgtcacaaagatacgcagaatccgaaaaaaaggttacttttgttttcttataaagtataaaaaatggcagaaaatttaataatcaacggtgagaacaagcgggaactatatgagacgctgcttcctcaattgcaatcgctgacagcgggagagacggacgtcgtcgccaatatggcgaatgtcgccgctgccctgaaacaaacattcgatttcttctgggtaggcttttatgtggtaaaagaagagatgctcgtgcttgccccgttccaggggcctcttgcctgcacgcacatccggtacgggaaaggtgtatgcggaacagcctggaaggatgcacaaacaatcattgtcccggacgtagagcaatttccgggacatattgcctgtagctcggattcacggtcggaaatcgtcgtaccgatagtcagagatggaaaagtggttgccgtactggacattgacagcgacaagctgaacgagttcgacaagacggatgcggaatatctggaacgactttgcgcaatcttaccgttttgaacggtggaaaacatataattgtgacaacccttcccccctaatccgtccaggaagaatccatatgatataatttgaaaaaacggaagcctcagatggaggtcttccgttttttattgtctattcgaccgtcaccatctttccctccgtattcgcccggacaagatggtcatacatcgcttcgcaatagaccggaggcaaatagaaacggccggggtagacagcacaaagattgatacggaccgtcacttgttttccggcaggcagatagtcaatatagctgtaagcacgatcatcacgaatatcttggtaattgacacctgtcacccgattgtcaaccgtgccgcctgtaaggaagcgcgtgttcaatatctcccaaccagccggaaaaacctcagtcagcaccaggtggttatagccacgaggagacgaatttgcgacggtcaccacagccgtgaagttcgtaccctgctgcaaagcggaggtattcaccggatggccgtcatgatccatatagctgacggcgagcgtaagaccgttcgcataggcttcctctttaccctcggctgggataccttcagccacgaggcgggcgaacagagtggatttgccggtgttcttcaactctaaggaggcagaagaggcagtcttgtcaagcaaagtctccgtccagatgttccgagtggtggaaaccttcttcgtcttgccgtctacggcataggagaagtccatcaagccggacatcttatatttctccatatagtcggaaagagccaccaggccgaatgccgtggattgcgtgctcagccaatcgtcggatgcgagcgtcttggatatttcattcgccaagagagccgcttccttgccgtctccgagtagacagaacgtcatcaggcggatcgaagtatcacgcaagtcgctgccgaacgtctgatcgtatccggaacaagccgttgtcagagccgttgtctttacaaccaactctttcgatacatccggacgtccgaccaaagcataacccgccgccaacagatagcgactcatagacatgagcgtcttactctctttcaggcgattcatggcgccgacctcggcaacttgccctaaagcgaggacaaacaggcggtatgcctgcgtcatttcttcggattcggcagaataggaggcttccggtttccagttacgggcaatacggctcaagtcattcaacgcattccgcttcatgccttcgggtacaaggtaacctttcttctccgcttcgagcagaaagtggatggcataaacagtcccccaagcattgggagccgttccaccaggccagtaggagaaggaaccgtctaccgtctggtaggaacgcaggcgacggatcacttctttcacggtcgcttcagtcgattgctcctgttcgcgggtcaacgaggcgaccccgctcaagtacagttgcgggaatgccttcgaagtgatctgttcaacacatccatgcgggtagcccaacaggtaggacaaccgcgtggagaggttgacaggttggacatccgacatttcgagcacaagggagttcgtaccctccacgccgggaaggccgaccgtccctttccagctctttccggcttcgagcgtcacaggtgtcaccttgatttgcggacggcgtacggaacggatttcgatatcggtttcatatacagacttttcaccaccgccggtagccgtgatcttcacgtgtccggctccgggggtatctttcacacgaatgcggaactgcgccagtttgtcactgaccgtttcaaagtgcagcatatggctcttctcgccgactacctccatattgccggagcaggcgatcgtgacctgcacgtctccaactcctttttcggtggcaaagacggtagcaggaaccaccatctcctctcctatgccgataacgcgcgggagtgtgccgagcagcatgacaggcttgcgcacgagcacgctcttctccgtgttgccgtaagcctccccgtttccagcgacgaccatgacgcggacacggccgttgtagttcggcatcttataggtatgctgccgtttttctccctttttcagcagaaacggaccggcaaactgcacgaccggcttaaagcggttcactatcgccttcggacctttgttcaaggcatcgtcgccgccaatactgaacagttgctcgatacggccgccatacgcgccgaccacgtagttgtacaaatcccaggtattaacccccaatgcctcgcgggcgttaaacgcctgccagggatcgggtgtgcgaaagcgggttaggtcaagcaacccttcgtcgacaatcgccagtgtgtaggccatctcgcgaccgttcttttcggaaaccatcacgtgacaaggtgcttcaggcttgacctcatccgccatatggataatcggggccaaatggctttcgggagatgtaaccgtgaaagggacgacaccgtacatgcggatcggcaggtcgttcttcgtgacgccgtgcggctggagcagcgttatatatatgtatgcattgggctgcatgttagaagtaacggcgagcttgaccgtagtctgcccatcgttgcacacatgctcggtggtcgagaggacacgcgtaccgttctcgatgctgatgatcgcgcgacttcctttgacggaagggaaggtgacgacgatctgttctcctggcacgtatgtatccttgtctgtcttgaaagtgagcatattggcggaggaagagccatcagcgtcacgccttccttcactgtaaggccaatcgaaatagctcatcacaccggtggagtgtttgctctttttgtctttcaccgaaatgaaataggttccccaatcagcatcggcatatctcaggttgaaggaggccataccattcgtaccagtacggacggtgaaggttttcaccggtttgttgtacgaattcgagacatagttcgccaggctcccgttatctgagctccaccaccagtaccaatggactttatagactttcacttcgagttcggtattggctaccgcctgtccaagataatcaacggaggctacctcatatttatattcggttcctgtcttcagtggttccccgtcttgctggggcgacttgatgccggcatagcgacggtagggtgaatagaacgcccggttagcatcgatgctaaaatcaccggattcctcatacacacgggtgacgaaactcgccaacaacataccgggagccgaagcgccggtctcgaaacgggctttgatggtggcgtcgcccgctgcatcggtcacaccggagatcactttgctttcttcgctgttgaagattttcgaaggatcatcgaaatagaatttcttatagccggaaaaggtggtcggggtcgagataaaggttccctgaatatcgtatttcagattgcgggcagttgctccctgtagccattccacgtgcatagcggcatcgagcggttcgcctcggagcaattttttggggggcatcgtaagggatatcttcaagcggttcggtttgatcgtttcgatacggagacgcttcgtaaaggtgacgccgccgacattcacgttgacgttccaagcgcctgtcggcgcatcgggttcggtcggcatatcgaaaacataaagtcctgcttcgccttttgtctgtgtcttgcgcaggtagaactggccgagcggattgtaaagttccatgatgaccggatggttagcagggagcatccggctgcggtcgttcaacataaaaccgagatgcagcgtgtcgcccggacgccatacaccgcggtcgccgtagatgaagcccttgatgcctttctgcacgacttctccggagacatcgaacgaactcagcgaaagggcggaaccgtcgtctacacgaagatacgagcgttgctgtccgagggaagcagtcagatagaacggcttgccgtttttcagcgagaaacgcacctgccctttgtcgtctgtcacgccggaggctaattcctgacgctggtagttgtaggcaacgactttgacacctttctctggatgggtgctcagaatgttatgtacaaggacagtcatatcgttatcttcgccggccatcgccaacagaccgagattggtggcgaggacattcttgccgacggtcgtattataataatagctgttggaacaggggtcgccacgtttgctataatcgtagtcggaccagtcgaagtcgccgttatagtagtaataaccgcctccatcgaaacggctactttcttccttgaacttgatctcatcatcggcaagcagttgttctttacttttcttgacgaggtcttcgcagggataggcggacaaatcccggttgaacgacagttccacccggtagatggcgccgggttcggggtcgatcagttctttcaaatcgatcgcgtaggtattccaacgactgagatcctgggtggcgtcttcatcgaggaagatcgttttacgcgcgatcaggcgaccgacacgcatcaggtcactcgttccttcgagatcattcacctgaaggaattgtccgatgttctgttcgaatatcttgatgacacgcactactacgccgcgcaagtagacggcttgaaaaggaatagtcagttgtgtggactgtggggtgatcacaccgttgccgataaaacggacttccggcttttcatcactgactacgatctgacgaacgatgctttctttcaggttcagcccgtttttgcttctgatgttctggctcagatgaacattaagggcacctttgctacctgcatcgggataaaggcggagcttattgccctcgacattgacggtctccgatttgttaccgtcgatccaggcaagtccctgcatgttttgtgccgcatcgagtagtttcgtaaaggtgacttcgacgtaacgttccggctctgcgacatattcgacttcatacacggcaaaatcattcagttcgggaatatcgacagatagcagttcctcctccggcactttcagtttattcggggctacggataatttaaaggcacgtgtcgcatccgtcccggcctgtatgttcgagatagaaatttcatgcctctttccgtcgggactatgttgccatctggcattcgccttttcggaaaaacggacaagcgactctacagtttcgggaatttccctgtccggcgtaaataccgagcagacaatgtcgtagccgttttcattcttccggttgatatcgacggattgcaggttggcacgcaacagcaaaggctgcgtcgagaatctgaatgagaaatatttgtcctttcgttccgtatcaaaccactctgatagatcagcctttacctcgtaacgagtgtcgcgctcaaaactcttggatggcttgaatacgatcgtccggttattttcaaatgcgaactcgccgactgtctcgggcttgatcttgaccaggtcacgaagttggtcaggctccattctgtcaactgctatttcctggttgaaaatcagatatacgggcgtatatcttgaaatcgtaccggaggtaaacgcctccacatagggattgaaagggatctcttcggattcgcttttaccttttccacatctgctgaataaaaacaaaaaacaacaggcacagatataatacagatatttcgccatatttcctgaatttaacagttacactttcgacaaacagactgtctgcgaatataagcatttttatgtacattattattattattttttaccaaatggtaatttctggccggacttaaaggactacttttgcaaactctttcctcgcccttcctcacttattgggagaaaggggattatggctggcaatgccatgtgccgaactgattatttttatcgcgttaacagctgattatcagtatcggcacaagatacgcaaggtggcggaataaggcagctatcctctggcattccgcatcacccgctctatcgcatcattcatctgcgcgatggactccagaccaagtgtcatgcaatgcaagttactttcggtaacagcaaaacggatggaacgttcgcgttcggcatcagaaacatgtttgccttcaccaaaaattttcattccgataagccctttgcctttcttgcgtgccttgcctaaaagttcgtttacggcttcgaccgtcccatccatatggctttggaacggattcaagcgggcgaggataacgtcacaccacggattgtcgactgcctcgaccagcgcttcccagttatgacaggagacgccgacagctttcacgataccatcctgcttggctttcgccaggccgtccatataaaatttacgagtttccgcccagtcgcctttcgtcatacagtgcagtaggaggatatcgaaatagtccgtaccaacttcctggcggaaacggtcgagggttttgctgaccgactcgcgtttttccgacccttcgtcgtaggtccacatcttcgtcatcagcgtgagtttctcacgaggcaactctttcagggcttttccgacaaatggttgcgaaccgtacatatcggccatatcgaagaagcgaataccgcgttcataaccgtgacgggctatcttcacaaagttatccagtccgagccgagtctgattggactggtaattccagcctttcgtcccggttcccatagctatacgagagactttcaatccggtctttcccagtttcaccctgtcgaccgatatatccgaaggtacggtcatctgtatgttggcaagtcctgtgcggactaacgataaaccggctactccggcaatcccagtctgaataaatttacgtctgtccatctctataatttttaggtaatactttctttaatatcaaataaccgcacaagcctgaaatgaacgaaccggcaaatacgcccaactttgcctgattcaatagctctactccgacatcaggcatcccggcaaaagacaggttcgcgataaagagagctaccgtaaaaccgataccgcccaacatcgacaccccgaataggttccgtttgctcaccccttccggcatcgtagcaagacgcaaacggacaaaaatataggtgaacaggaaaatacccagcgactttccggcaaacaggccgaagaataccgccaacgggattcccggtaacgaaccgatcccgatatccccgaaagtaacgcctgcattgacaaaagcgaagagcggcaggatcagataattgactaacggatggagtttgttggcaatgctttgcaacggactgattgttttgtccgccaatgaatgaatattgttgagaacttgaatctgtgtcgatgaaagaaccgccgctttccgggaatgacgcacttctgtgtaatccagcatatccagatagccggtcatttcacaagtgaaatcatccagcttaacaaccggacgagccggaacggtgaatgcgaccagcacacccgctatggtcggatgaatacccgactcaagaaatagcatccacacaaagaaacctattatatagtagaaagcaatgttattcaccctcatccttccccctacatatagcaaagccagcaaggcgagtgagatcagaagtggctcaaacgcaatctcaccactataaaacaaggcgataataatgattccgccgatatcatccaccaccgccaatgccgtcaaaaaaatacgcatgctgagtggaacccgttttcccaacaaccctaaaacagccaaggcaaaggcgatatcggtcgccatcggaatagccacacctcgcacttcgggtgccgaatgacaaaccagaaaataaaacaataccggaacgatcatcccgccgcaggccgcaataatcggaagcagtgctttccgtaccgaactcaactccccaatcagaatttcctgcttaatctccaatccaatcacaaaaaagaagactgccatcaaggcatcattcacaaaggccagcatcggcatcacttctccatgatgcataaacggtgtgaaattacctatcttcaaatcaatcggatgagataagatgttatggtaggactccgcccaaggggaattggcaaatagcatagcaagaatcatagccatgaataataagatactcgcattcggtttttgcatagcaaaacgacgcaacggtttaaggataacgttgatggttctatccatatggtatttaaatatttatgggaagcggcgtgcaaaccgcttccctttgattttttcctaacaactgtacacttacatgtcaacttgctccaacttgtaagcactgcgagtcagtttttcaacccacacgacaaatataccagttaaaattaaattaaacactatggtgagcacggaaatcataagcgctgggcctcctaaattgtaaccaagcgcgataaagataattccggcccctacttcaccgcgtgtaaacataccaatcgatagcgccagacgttcgcgcttccgtctttcccgataaaaaaacaacgggaacagtttcccgatattggacagaaacgaaacaatcacgacatgcaggatgatcatcggcaaagacatcatcggctgcgctccggttattgttgtcgcttctacagactgcgcggcaaaatccactccgaaaaagactggcatgctgactcctaccagaaacataaagaggaacgagactgttgtcgccacattgcgttcgaccttcgtatcaatatgcttatgcctcatcaccatacccaatacaaacgcaggcaacaagacctcgatatggatgctggcatcttcgccataaaggtatttggacaccaaataaaccgcctgcgtaatcccgcaggtaaggacggcatagaaaagaattgccttccaatcctgccgcatgtcataactgcccatctttctccatccgatgaccagaaggaccatcacgatcaaaatggtaacgcccaactgccagcgcaagcctaccatcataatctgcaaaggaatcatcaacagaatcgtatcaaggtcgtcgaagattgccaatacctgcactttcttgtatacccaagaagatttcaaccctgccgccgccaacattgtaaacagtataccggctgaagtcggggctgcaaaccggctcaacaaaaggttttctttccaagcttctccactgttccagtaaatatccggaagcaacacgaacatataatataacgccacgaagatccaggggaaagcagccgtcgccattgcaataaaataatcttcagtataggatcgccaacggcttttatccatttcgaactcccgtcccacatttatcatgataaaggccaggcagacatacaacagggtattggagaccgtcttcaccgacgaatacccctcacctaccatcgccggcaggaattgagatacaaccaatcccaacatcagaaaaaaagaaaataaaagaatcttcttcattatttacaaattgtttttgtttagaattataataatataacaacttacttaaaattcggttctgggaatatagacactttccacctttaataaccgcgctttcaaacgttcggcctctcctttgcggatacgaagggtcatttcacaatccatttcaaacttttgggagacgatcactggattctcatccttgacaatgcgcatgattccgttcagataagggtattcgaacgcaatggtgatatcttcatcaacagtgcgctcttctatctcggcagcagctattgcttcggcggcggctgtccggtaagcaacaatcaaaccgctcgttcctaattcgattccgccgaaatagcggatcacgacgatcaggatatctgtcaacccgttcgagttgatctgtcccagaatcggttttccggcagtagaggaaggctcgccgtcatcgttcgcacgaaaagttaggcgttcgggacctaacatataggcccagcagacatggcgggcgtcataatactgtttacgatatttgtccagttgctctttcacctcttccaccgtacgcaccgggatcgcatacgagataaagcggctgcgcttctccgtatagtacccttcagctatctgattaatggtcttgtaactgtcgtccgccatcttttaatccggtatatgggtttcctgttcttcccggaaagcccggaaatctttcattatctctcctatctcctcaataaaataagggtctttcacgtgcttcttcacctcctcataataggtttcgatggccttcaacgcacacaaatcctgtccgcgcagcagaaagtaaggttcttccttctccacgcattgtttaatcatctgaataggattcttcatttcttatcgctttttaattcgtctttcaaaaatggagccgtatagctcttcgttttcgcttttaccatttcttcgggagttccggtgaaaaggacctgcccgccgttacgtccgccttcgggacccatatcgatcagatagtcggcacatttgatgacatcgaggttatgctcgatgacgatgatcgtattacccttatccaccaatttattcaggacgcccaacaagacccgtatatcttcgaaatgaagaccggtcgtcggctcgtccaacacgtaaagcgtcttgcccgtatctttcttggccagttcggtcgccagtttgacacgctgactctcaccgccggagagagtcgtggaaggttgccccaacttgatatagcccaggcctacatcctgcaataccttcactttcgacaagatcgagggaatattctcgaaaaactccaccgccatattgatcgtcatatccagaatatccgcaatggatttcccgcgaaagcggacttccaacgtttcccggttgtatcgcttgccatgacattcttcacagggaaccagcacatccggcaggaaattcatctcgatcgtcttgtaaccgttccctttgcacgtctcgcaacgtccgccggagacattgaacgagaaacgtccgggtttgtagccacgcactttcgattcaggcagatccacaaacagattgcgtatatccgaaaagacgccggtataagtagccggattacttctcggcgaacgtccgatcggtgactggtccacattgactatcttatccacattgtctatcccttcgattgatttgtaaggcaacggatcttccagggaacgatagaaatgctggctgagaatcggctgcaaggtccggttgatcaaagaagactttccgctaccggacacgcccgtgacacagatcagcgtacccaacgggaacgtgacatccacattccgcagattattcccgctcgccccttttatcgtgataaactgtccgtttcctttccgccgctcttccggaacggcaatctccgtcttcccgttcaggtaggccgaagtaagcgtgtcagctttcaacatttctccgggagttccggcaaaaacaacttctcctcctagacgaccagccttcggtcccatatcgaccacatagtccgcattcaacatcatgtctttgtcatgctcgaccacgacaacagagttgcccgtatcgcgcaactctttcaacgagttgatcaaacgaacgttatcccgctggtgcaaccctatactcggttcatccaagatataaagtacattgaccagctggctaccgatctgggtcgccaaacggatgcgttgactctcgccccccgataacgtcgccgaagcacggttcaacgcgagatagtccaatccgacatctaacaggaatttcagacgtgaacggatctccttcaagatttcgacagcaatctgcctctgcttaagattcaactgctcctcgacaccctccaaccactcatacaattcagagatatccattgccgaaagttcggcaatattctttccggctatcttataatgcagcgcttccttgttcaaccgctgcccgttacattccggacaggtagccatccgtataaactgtcccgcccatttctgcgcggaagcggaagcctcgctcccctgctgcatcaggatatatttggcaactccttcatacgacaggaaataattggaagtacccagcgaatcgttttttatttgcaggcgttcgtccgtcccgttcatgatctcatcgatcgcttcttccgggatgtctttgatcggggttttcagtgttacgccatatttctcgcaaatagcttcgatctgccagaatatcagtgaattcttatattttcccaacgccacgataccgccactgtagatactgagcgacgcatcgggcacgatcttgttcatgtccaacaaattgacctgtcccagtcctttacatttcgggcaagcaccctgcggagagttgaacgaaaaattatggggagctggttcactgtaagacaaacccgtcacggggtccatcaaccggcggctgaaatggcgcacttcgtttgtctcggcatccagcacgagtaccagtccgtcgccctgcttcatcgcgatgcgcaggctttctttcaaacggcgttcgtccgattccgaaacgaccagcttatcgatcacgacctcgatactgtgcatcttataccggtcgagcttcatgccatgaaatatctctttcatctcaccgtctacccggacattcagatagcctttctttcgcatctgctcgaaaagttccttataatgtcctttacggttacggacaagcggggcaagcagataggtcttcttccctttatactggttcagaatcagttccaacgtctgctcttcggtgtatttcaccatcttctcgccgctcaggaaagaataagcctctcccgcccttgcataaagcagacggaaaaagtcataaacctcggtagtcgtccccactgtggatctcggattcttgtttgttgttttctgctcgattgagataacagggctcagaccagtgatcttatccacatccggccgttccatatttcccaagaagttacgcgcataagcggagaacgtctccacataacggcgttgcccttccgcaaaaatcgtatcaaaagccaaagacgatttaccactaccgctcataccggtaattacggagagcttgttacgaggtatgtcgacatctatattcttcaaattatggacacgcgcgcctaaaacggaaatacggccgccttccaatgcattcttatccttcatcatttttcagttttcttatttcaccacccaggccagattatgcacataggtgttaggcgttttataatacatatcagattctttcgggatccggatcatatatgtttttcctgccgtcagcaatttacgatcgcgcaaccagggattgaaacgtttcagatcggcatacgtgacaccgttcttcttggcgaaaccggacaattcctgaatatccgtcgagacggcaacgttctcgcatgcgatcggtttatacaaatcctgcgccctcagcacgaacccatatttataaggagcttcgaatatctgcttgatagccatgatacgatagacatagcgggtagtctcttccaccagccagagatcgaacgaactatccgcatcctgcttgacaagctctcccgatatgcgtcccataccagcgttataggaagatgcgaccatcgcccagtctccatatttttcataggcagctttcagataacggcaggcagcttcggtagcctttgccacgtcgcaacgttcatcgaccgtaggcgttatcgtcaacccgtactgacgggccgtaccttccaacaattgccaagtccccactgcccgtgcaggcgatgagacccgtggatcgagatggctctcgatcaccgccagatacttgaagtcgtccggaatgccattggctttcaggatcggttcgattatcgggaaatagcggtttgcccgcttgatcagcaacatggtagtagaatggaaataggtaaagctactcaattcccggtcaaaaccttcatgcatattataacgcgtcaaatcgatatcttttccgcaaaaagagacggaagaaggaatatcaggcgacatggtcaccgatgaaacgaccggacgttgatctttcactttttccgaatcactcgaaccaatggagaggcaggcggtcaggcacacagcactacccaccacaaaaccgactatactattactgttcaataatttcatcatcaatcttcttgggtctaagaatatttatagaaccttttttattatatttaataccatccgatcccactgcatctatcacataaaaatagacgccgggagcgacatatttcccaccttttttgccatcccacccttcagccggattagtagaatggaacatctgtactccccatcgattaaatatccaacacttataggtcacaagtgatttgtaggcgacacgaaattcatcattgataccgggcgtcgtacctggcgagaaagcgttcgggatctgcaattccgattctgcaatcttgatttcaatagaattggaaaccgcctcgcattctcctgtcgcgttgctgacagtcgcaaccgccgtataatcacctttctccgtaaacgtatagtcgatctcctcatccctatattccaccagcggattctcagctccgttttcctggtcgctcctatatatcttccaggtatacagcgtcgctaccggatcattggcatacgcccgaaaagtgaccgttgccggagcggaaatatattccccgtctccagctgtcatattctccgcattatccactataaacgtcgtatcgacatgcacttcgacggccaccgcctgataggtatccgaagtgattgatttctctattccgaaatgttttgcaaactgatcaccggaaagtgtgacttccgtatcgcacaacggaattgtttcgttatcgtttatctttgtcgaataaggcccttccgtcagtgatctttgcacattcttgggcgaaaaatagttgttgtcttcagaccactccaatgtctgataagcgacattgaactcccgcttcaccgttatccgatttcccgtcggggtataataatacataactgggacagtcggagaaccttccagccaaaagccgtcacaatttcctttgactgtaatgctttcgacattaaaagcgtatttactataatcaatgatccatacataccaaccattcaaaccagaagccggatcttccacataatacccggcatcctcctctatattccggacaacggatgtctccccattctgttcacacggaacaggttcccggtccaatgccttttgcttatatcgataccattgatgattagtagacgaagatgtatagctaatctccacattatccattccatacaccaaataaactcgtatacgatttcctggattctccaacaaataaggaaccccatttcctcctgtaaccgtatattgctgtgcctggatggccaacatcacaaacaagaaacaaatcaatcctcccagtttcctaatttccgttcttagcatatacataacctaattagtttacaaaattactattttatacggatttatacggagataaatgcctttttattgtattatccagacctcaatcctttaaaaaccgtggctttttgttccataaaaatacaaggttttccctaaaagtatctatctgtttgaaaagaaattcttcgtttgaaaggaaaatatctgccaatttggacagcgactggcatttaaaaaacatatctgtttcgaaaatacaaaaaaagaggagatgcaatcaagcataacctcttttcttttttatcttgatgaaagattatttacacatatcgcgaatgatctgaatcagctcgtcaccaatctcttccgcttcctgcatcgtgtgagcttcggaataaatacggataatcggttccgtattgctcttacgcagatgcacccatttttcagggaagtcgatcttcacaccatcgatatcggtgatatcatactgggcaaatttctcttttacttttgccaagatagcatctacatcgatatctggagtcagttctactttcttcttggaaatgaagtatggaggataggaagcacgcagttcgcttgtcttcatctgcttctttgccagatgagtcaggaacaaggcgatacccaccaaagcatcacgaccgtaatggctggccggatagatcacacctccattgccttcgccaccgataatagcattagtcgctttcatcttcgttacgacattcacttcgcccactgctgccgcattgtactcgcaaccatgagcacgggtaacgtcacgcagagcacggcttgagctcaggttgctgaccgtattgcccggtgtatgactcaaaacgtagtcgctgacagccaccagtgtatattcttctccaaacatctccccgtcttcgctgataatagccagacggtctacgtccggatcaacaacaaaaccgacatcggctttggcatgcttcatcaggtcggagatctccgtcaggttttcagggatcggttccggattatgtgcaaagttaccgtgaggagcacaatgtaacttgaaaatttcctttacccccaaagctgaaagcaattcaggaataacaacaccgcctaccgagtttacacagtcgatagcgacgcggaaattagcagctctgatagcctcgacatccaccaaatccagcttcaacacactctcgatgtgcttttgattgtaagtattattaacatagacttttcctaaattgtcgacatcagcaaatacgaaactttcttcagcagcaatcttcagcacctcggcaccttcggcagcattcaagaattccccccgttcgttcaataacttcagggcattccattgtttcggattgtggctggcagtcaaaatgataccgccacaagcttcttcccaggcaacagctaactcggtagtcggagtagtagccagatcgatatctaccacgtcaaagcccattcccgtaagcgcaccgagaacgacttgtttaaccatcggaccagagatacgtgcatcacgacctaccacgatcttgtttgttgtcaccttcgtgtttttcttaatgaatgtagcataagcagccacaaacttaacaatagccaacggattgagcccgtcttccgggttcccgcctattgttccacggataccagaaatagatttaatcagtgtcatttagttagatttattttataaaagtatacttcactttctcaaaaaacacaggtgtccctgagctttgaaaatcactgctcatcagtttaaacggaacgatcagtttgacaaccgcgctgtctcccacgtaaggaagtccggcacctaaaccttcacaaataaacatatcccatgtataagagtaatcaggattcaaagaagtataataaccatatctgaactctaccggatgtgtaccgtttgaattaggaccgagcaggtcgacggtaccggttcccatgctactgttttccataaacatccgggcgatgaaacgggaacggatcgccgtttgtcccagtaccgcacgttcactgtttcctttattgacgatattcagataaacaccattatccaactcaacaaattcattttccttaaaaatgctgtcagtcggaaattcttccagaaaaaccaatccactatccgcacgcaaacgatcaatagctttctcctgggccttcaacatatcagtgtatgactttgtcttgtcacacgacaccaccattatggcggtgcacataatcaacaggatataaaaacctctcttcatctgttacctatttattgtaaatgaatggcaaatgtatacaatctccgccacatctcagtcatgtttatctaaatcttctgttttattaggattaaattcctccaggcctttttcaaatacggcaacagcatcgaccaatgagccataaaattctccacccgaagcatttttatgtccgccgccattgaaatagcggcttgcaaactggttgcaggggaaatcaccgacagaccgaagcgaaatcttcacataatccttatcttcgcgaataaagacactgaaagccacattttcgatgctcaacggcagattgacaaatccctccgtatcacccgtcacataatggaaacggttcatctcttccagcgaaagcgtgatcagagcggcatgttgctccggataaactttcattttttcatacagaacgtatcccatcatccgtaaacggctttccgaatatacctggttcactttccggtagatcaaatccttatcgatacctttcttgatcagttcgcttatgatcgtataaatttccggcttattcgaattgtaggtaaacgaaccggtatccgtcatcatacccgtataaatacaagcggcacaatctttattgatcaggtcgaacatccccatacgacagatgaaacggaaaaccatttcgctcgtagacgacatttcaggatatgacatcgtaacccggcaaaaatcagccggattcagatgatggtcgatcatcactctacgcccctctgccgccacaacagccggagccaatttttcgatacgcttgggttcgttgaaatcgaggcagaataagacatccgcatcccggatcagctgttcggcaaaatcaggatatttctcatgaatgacgatttctttatgtcctggcatccatttatagaattggggaaaatcgttagggaccactaccgtcacgttatcttttccataggctgtcagaaaatggtacagtcccaatgcggaacctatagcatccccgtcaggggtaacatgtgtcactattacaaaactttcgcctttctcgacgtacttcttggctttctgaattttctcttcgtgaatgattttcgtaatcatatattctcttattttcaatgacaaaggtactactttttttagattccacactgctttaaatcctcaatcacccggacaagaagtataattaacaacaaaaacagaatgacgagcaaataacgcgaacgtccggtatgaccatacaacaggatagacaaaagcattccatacgccaccagcatcgcaggaaaatcgaaccggaaggagaaaaccgcccccggtacctggctaaaagcatcgacaacccaaagcaggtcgtgcgccaaccattccaccccaacctgcaaccagccatacccaggaatccattcaggcaaaaacatgtagaccaaacttgccggtatcaacaaagtcgcaagaaacgtaagcggcaagttcgtcaacaaaaagacagtcgaaaactgcccgaaataatacagacataaaaaagtcgtgcccgcctgtgccgacagagtaaccgtgacccacccccacggtgtcctcaaaaacggattatgcacttttatcaacgcctgcaaccgaggttggaaataaaggatggacagcacggccagataactcagctggaaacctatgtcgaataagtacaagggttcataaaccaacatgcaaaaagcggaagccgccaatatattataacgctccgccctcctatccaacactccgcccgtcagatacattgtaagcatcaacgctgccctcacagaagagaccgccaagcccgttatcgcagcaaatccccacaatagcacaagcagcgagatgtagcgaatccaccggcaacatccattcctggggagaaaagaaaaaagaaaagataaaaagccacagacgattgccacatgaaagccgcttacggccaggatatgtgctacccccgtagccgaaaaacggttccgcacctcccggctcatagcttgccggtaaccgacagtaatagtggccagtacagatttttcttcatcggtcagatttagttttgcgatcggctccaataatcgttgctgttcttcccgcgcccaacgggaaagaagggaagccggatgttccgacaaggcctcaaactgcgaataagcagtcttttgtatcgaaaggaaaagcaacagagacaagaaaaccactccccacagccaacgggtttcataacaaaaatgctcctgccctctcaagacaagaccggctgtggtaaggataataacagggagcaatagtaatacccaggaataagtacaacacgaaaaaacggtctgtagcataatccccgcaatccagacaagcagcggacgggcaaagggacggatctgtaattcttttatcataatgtaaggttttgaaatggttggtttaaggcttgatcggtattgcacaaaggacgtcattccgtagggggcagtgctctgctctggccattgcatccaataaaggtacgatttctgattgggaggagtagaaccccgcccctacgagtcgacattataattctttcaattctcggatcgtcttcaacggatcaggggaacggaaaacaaaactaccggcaaccagcacgtccgcccccacctcaagcaaaggtttcgccgtctgcatattgacaccgccatcgacttcgatcaaggtattcaacccttttgccaggatcatatctttcagacgagctgttttatctatcgaatgttcaataaacttttgccctccataacccggatttaccgacatgagcaataccatatccaaatcctgcaagatatcttccaacaaggaaatcgacgtatgcggattcaatgtaacagccgccttcattcccgcctctttgatcgccgccaccgtacggtgcagatgtgtacaagcctcataatgcacattcatcatataagcgcccgtagccgccacttccggaatgaacttttgcggttccacgatcatcagatgtacatccatcggtttcttgcaaattggcttcaacgcttccagaaccggaaaaccaaacgatatattaggaacgaacacaccgtccattatatccagatgcaaccaatcagcatcactctcgttgatcatttccacttcccgctgcaggttcagaaaatcagcagctaacagagaaggtgctattttatgtttcatactctttttgcttttctgcaagacgacgtcagttcattactaaaccacagagttccgtgcgtaaagcgggttctgaatgataaaccctcgcaaattgggtaaggaaatcaagtgtttgccgacgcggcattgttttcctttcttttcggtttctgtttgttttattttctatttcattcatacattgagtagaaagtctcttcataggcaactcgttttttatcttgtttgataataaaacgggcaagctatctccttattgtatgacaagaaaataaattttcaacttttagagcctgtttaaatttctctgaaataaattttgcatagctctcatcggcctgctttattctattataggattattttgaaaaacaactgtcatactatcactaatttccttttatcaattgaatatcaatagacacaagcaatgatagtaggtatgacggatgcctattccatctatcatactatcactaaccgcctgtccaagattcttcttcacatgacttattttcaataacataataagataaacccattgacacccgggtctcgatatcattcacactcggatgtcaagaccgttcacatccgggtgtaaaaagcctgtaaacgggaatcttcggcactttttctgactgtttgaagcaaaataagtcacctgtttcaacaaaaaagacggcatctcctacagaaaaacatcctcaatacaactctcacaaccaacaaatgcaaaatttaaacaggctcttattatcaagccatcgacagctcgatactgttttcttccgccatacgacgcatattcaagatcgcataacgcatacgtcccaaagccgtattgatgcttacacctgtaatatcggcaatttctttaaaactgagatcttgatagtaacgcatttccaatacttcgcgttggctgtcgggaaggtgcttcaccaactttttcacatcagacaatacctgacggcgtacgatgttatcttcgatcgtgccgtcgcaaagtttgatattattgaatagatccacttccacttcatcatttgaaaccgtattttcactgcgttcctgacggaagttatcgataatcaggttatgagcaatgcgggtaatccatgctttaaacttaccgttttcggtataacggccttgtttaatggtcataatcaccttgacaaaagtctcctgaaagatatcttctgtgagatctttgttatggactataaagtaaatgtaggagtgtatgctacttttgtaacgattcaacaatacatcgaaagcagcattattaccttctgcataaagaacgaccagctcttcgtcagtcatcattcttaaagtcttcattacttctatatttttagttttttcttgagtaatgtttatgctataggcaacgatatttaaaattgttagacaataatattatttatatttacaaaggcaaaagaacaaaaagtattttaaataggcaaacatttcctttatttttttataagaaatacatctataatcaactcctctcccactatcatcagaggcatatctgccgtccggtgttaaatatagaatcatataatttcctacgccatatttccctattgcatattcattataacgttttaactgttccggctgatccttggcataaaacttattttcgataataactgcccaatttgaactttctataagaatgtcaattcttccatattcagaaactgcgacttctgtccttaccaacgcattccgggagtcaaaaccttctatctgatttatatccaaaaacagctttaagaatgagttatgtaatccgtgtgttccttcaggattcaagagttctgccagaatagtagaatgagtattttcataatggctcactcctaaaatatgaaatatattaaaacgagtacccattatttccaaaatctcattattcttttttgacaataaagatatttgagataagagggtttgtattttgtccataataataatataatgaagggagatgtacgaaaaacaaccttacccccacgcttgaccatacataataaaaatcctatgtacgctgtgtacttggcaaatatacaataaaaaaaactatcttgccttatctctcataagcaaaacgtggttttataattcaatgttgccaatgatcatccataatcagccatttcaccccctccaaacaggcaaaaaacagccggagagcagcttgaaaaattaaaacagcttctaattaataaaaaagcaagccaccaaacagaaatatccatttatattatctaactttacggattcaaatatattggaggttttatcaccataaacccgcatatccgatatatcagagacgataaaaaagaaaaaaacaatatataatgattacaaaatggaactttcaaaccccaacagaagaagagttacataagagagacaggctggcaagccaactgggactcagtccggtcgtatgtcttttgctcgttcagcgaggactcaccactgttgaagaggtgaagaaattctttaaacccagcttgaacgacctgcatgatccattcctcatgccagatatggagaaggcggtcaaacgcttgaataaagcactgggtaataaagaaaagattttgatttacggagactacgatgtagacggtacgactgccgtctcattggtctacaagtatttgcgtccttattcatcggcattggattattatattccggaccggtatgacgaaggatacgggatttcgtacaaagggatcaattacgcccgggaaaacgggatcacgctagtgatctcgctcgactgcggcatcaaggccatcgaaaagatcgaatatgccaagcagttggggatcgattttattatctgcgaccatcacatgccggacgacacattgcccgatgccgtcgccgtactggatgccaagcgggtggactcggtctatccgtacgaacatctgtcgggatgcggcgtcgggttcaagttcatgcaggcattcgccaaaagcaacaacttcccgtttgccgacctggagaaactgctggagctgacggcggtcagcatcgcctcggacatcgtccccatcaccggcgaaaaccgcatattggcttactacggcctgaagcagcttaacagcaatccgagcctcggcctgaaagggatcatcgatatctgcggcctgtcgggcaaagagatcacgatcagcgacatcgtcttcaagatcggacctcgcatcaacgcttccggccgtatgatgaacggaaaggaagcggtcgaactgctcctggcgaaggatgtcgacgtggcccgcgaaaagagcgagagcatcaaccagtataacgaagaacgccgcgaactggacaagaagattacagacgaggcgaacgccatcatcgacgaattccagaacatggaagaccgtaaggcgatcatcgtctacaatccgggatggcacaaaggggtgatcggcatcgtcgcttcccgcctgacggaaaaatactaccgcccggcagtcgtcctgacgaaatcgtccgaactgatcaccggttccgctcgctcggtcacgggattcgacatatacaaagcaatcgaaagctgccgcgacctgttggaaaacttcggtggccacacgtatgccgccggcctctccctgaaagaggaaaacctggacgctttcacccagcggttcctcaagctggccgccgacgagatcatccccgaacagataacgccgcagatcgatatagatgccgtgctggacctgcaagatatcaacgccaagttcatgagtgagttgaaaaagatgaatccgttcggcccggacaaccagaagcccgtattctgctcgctcggagtcaaagattacggaaccagcaagttggtagggaaagacttggaacatatcaaactggaattgatcgacgacaagtcgaacacaccgatacacggcattgcattcggcatgcaccagcacaatacgcatatcaagaacatgaagcctttcaatatctgctacaccatcgaggagaacacctacaacggcaacacgtcgttgcaactgatggtgaaggacatcaaggagaacgatatatgaagggatgcggtggatgtctaccataagatcttagggaagtattggggataccctgctttccgtcccctacaggaggatattatccattccgtctgtgccggaagagacacgctcggcctgatgccgacgggaggcggcaaatcggtcaccttccaggttccggcattggcgatggaagggatttgccttgtcattaccccgcttatcgctttgatgcgcgaccaggtcgacaatctgcgccgggtcgggatcaaagctacggctgtatattcgggcatgggccggcaggaaatcgttgcggaattggagaattgcgtttccggacaatacaagttcctgtacgtttcgcccgaacggcttgccaccggattattcagggaaaagctacaggccatgaacgtctgcctgttagtggtggatgaaagccattgtatctcgcaatggggctatgacttccgcccttcctatctccatatcgccgacattcgggagcaactgcccggcgtgccggtactggcactgacggcgactgccacgcccgaagtcgtggacgacatacagagacgattgcttttcaaggagaagaatgtgttccggacaagctttgtccgtccgaaccttgcctacatcgtgcgccgtacggaagacaagctgggcacactggcctacatactcggaaaagtgcccggcacggctatcgtctatacccggagccggaaacagacaaaagaggcagctctcttcctgcaacaagccggaatatctgccgatttctttcatgccggactgaaccgggaagaaaaggcgatccggcagcaccgttggaaaaataacgagtgccgcgtaatggtcgccacgaatgctttcgggatgggaatcgacaagccggacgtgcggttggttgtccatctggatatgccgggatcattggaagaatatttccaggaggcaggccgcgtcggacgagacagccggaaagcctttgcagtagctctctgtacagatacggatagttttcatctgaaaaagcggatagacgatgagtttcccgaaaagaagctgatcggaaaagtatatgaagcgttgggcgattatttccgaattcaggaagggcaaggaaaagatatcgttcataacttcgaactgacagatttttattccatttgccagcttcctccgctacagatacatcatgcattgaagttgctagaactgtccggctacattgaatattgcgaagcaatagacgaatcatccttccagaccgccccccaaatcacatatacgcatccacgtgtgcgaacaaatgtccttattatcccatcttccgcttatgaggaacgtcgggaaagaatgaaaaaacgcatttcgaaagtggtggaatacatgaacgggatacatatatgccggagtcgcctgctactctcctatttcggggaaaagaatacggaagattgcggatgttgcgacgtctgcctttccaagaatgattccggcctgaacaaccgggatttcaacgccatacgcgacctgttactcagactgctttccacccggcaactgcttcctgtcaccaccttgctccccttattaccttttccggaggaaaaaatcgtcaccaccatccgcttcttagccgagcatgacaaacggttttatttgaaagagggaaaggtgggaatttttacggatatcggaaatgccagataacgcactttagcgacttatcttttattactctcgttttttgttgttatctttgcccctaaataatccaaatcagcaaatgaataagattaacatatatgtactgacgttctttctgagtctggctggtgtatctatctatgcacaaaacaaccgatcacaagtggttattacaagcggacaagacaataatgtattttttcatacaatagaaagaggacaaactgtttacgcaatcgctaccatgtacggggttacgcccgatgatatttaccggctgaatccagatagcaaagaggggatcaaagcaggtgccacccttaaaataccgcaacgcgacatagttggaggtactgctaagaagcaagatggaaattatattttccataccatacagcccaaagaaaccctgtattcattatccatccggtacaccgttcccgctaccgccatcgtaaaagcgaaccccggattgtctacttccacttttacaattggcaagacaatccgcattccggcgacgcaagtggaagatttaccgacgacggagctcaagaccgttaccaaagaaattgaatataccgtccagaaaaaggaaaccatgtaccggatctgccggaaattcaatatttccagctacgagttgatcaagcttaacccgaaattgaaagaaggagttaaggccggtatgactattaagatacccgtacaagccgaagagaatatgacaaccgaacctgcaaccaccatgctttcggaaagagatgtcaatgcgttgctctcagaaccgaaaagcatcgagcgtgtcaacagcgtcaaagtagctttgttattgccgtttatgacaaatgaggctatcccgtctacggagacacaacgcttcatcgaatattacgaaggtctcttgctggcggtggacagtcttaaaaacacaggctgttctatcgatctgtcagtttatgatacaggaaacggaacaaagaaactgaaagagatcctgaaagaggatgccttgaagaatgccaacctcatcatcggagccgtacagaacgaccagatcggcccggttgcggaatttgcccagaagaacaacatcaaatatgtgattccttttacgtcgaagaacgacgatgtgttgtcaaacgcatatgtttaccaggtaaatacgcctcactcctacctgtatgccaaagcggctcaaggcggatgcgacctatttgccgaagacaatatcatcctactgaacatcagggatggaaaggataaaaccgaatttatcaaggcattcaaagccgagatgaaacaacggcagatcccatttaccgaaatcaattataatgccgaaaccctaactgccgatgtcgacacgctcctcagaacagacaaacggaacgtgatcgtaccgacttcaggcacattggaggctctaaacaagatcaagtctccgttacgtatgctggcggaaacaaaacccgaatgcggactgaccttgttcggctatcctgaatggcagacatacacgcgtgactgtctggaagatttctatgcactgaacacatatatatacagtaacttctatgctgacaacctgtcgaaagaagtggcagacttctataccaaatataaaaactggtatagtaaaaacctgatcaatatattccctaaatatggtattttaggattcgacaccggtatgtttttcatcggagcaatcaacaaatatggttccaacttcgagaataatctggataaaattcattaccagggtgtacagaccggattcgatttccatcgcgtaaataactggggaggtttcattaatacgaacatctttattgttcattatcaaagtgatttcaatgtaacacggaacgaagtaagatgatcaggaaagttattacaacagttattataagccttgtcaccctgaactacattcaggcgcaggataagttcaaacgggaattgtctttgggtgcttccttcggtacgaccttttccaaagtcagttttgcccagacgaaagtgcagcagaaaatgaaaatgggctacacgggcggtctcacgctccggtggatcacggaaaaaaatctaggattgcaggctgaactgaatttcatccaacatggatgggatgaaaagttcgaggaccaacctcagtataaatacagccggacaatcaactactttgaacttccgatcctgacacatatctattttggcagtaaacgtttcagggtattcgtcaacctaggacccaaaataggatatgctttcggtgaaaagacagacgagaatctgaacggagccaagccgaacaccgaaaacgaacagcacgatatgccaatcgaaaagaaattcgactggggattatgcggtggtccgggtatcgaacttcgtacaggaattggctctttcctcctggagggccgctactactatgccctcggcgacatcttcaacagccgtaaagaagattatttttccaaatcgtcttcgcaggtaatctcggctaagatcacgtatatgattccgggattttaagatttatgattgaacaatcttaggcaatatagaaatcaaggcttacaataattttgtaacaaagacaagccaagaatgggcagtaggctcctcccaaaacaaaaacgccgcctttccctttttaaaagtctaaagctctactacatggttagttttgcattagaagtattaagaatttatcaatgctaatagagataatatagtctttaggctatcagatttaggcccaaaaaagaggatatcccagtaatgagatatcctcttttttttatatactccgaaatgattatctcaagcgatccaaagaacgcaccagtgcttcgtctgccccaatattacgtatagccaaataatccagaatcaggctgattaacggaaaagaaaaggcgatcttcaaacttaatgagaatatctccttttgattacccagatcccagtaaaagaatgcaaagagaccgtaaaaacctaacatcaaaattgcattaaatacgcaaatccgtatctgaaggattcttttcttaaacaggaagatagtcaaaagagccagcaaagagatcacgattgtcaaagcaaacaatccccatgtgggataaataagttccggctgagcggccattgtactgataccggtcgcatcaaatgtaaacaattgatcacccgactgcaacacggcaagcggtaaaaacagaatggcaatcgtcaatgccattataataagcaaataaaccgtttgtattctctgtaacataataaaacaattgacaattaacaattaacaattgacaattattagatgatactcacctaaccgtcaattgtcaattatcaattgtcaattaattaaaggttattcttttcttttgcagggttcttataatacaccttaccatcttcatactccttagctgcgatcaaagtcggttttgggagtttttcatagtaacgtgaaatctcaatctgctctctgttttcaaaaacttcttccagattatcattataggaagcaaattcctgaagtttcttttccagatcctgtttcatctcaacagcaatctgattagcacgtttaccaatgattgcaacagtttcatacacattgcccgtgtctgatgacagcttcatcatgtcgcgggtaactgtattcgacggagcgttagtctttctgtaatccatacttactttattgattagttgtttcgttaatacgtatctgttattcgcttgctggcatagtcgtagaacttctgaacctgttttacatacttgccttcgggatactcgttcatgtaattgtaatattcatctacaacctcacggtaacgtccctgcaacttttcttccacactaaccacagccaattcgtatttggcacgaatggtatagaacataaactcttccctatattttgaatacggatagttcttaagtgcgttttgcgcggtaatcacacatgaaagatagttgtttcccatataggtacccaagttgaaatacagccggactgccaacagttccttataggcgagcttttcctgcaattcgaacataatgttctgagcttctttagcacgttcgctttgcggataatactccaaatataattgcaactggttaatggcttcatacgtttgcgcctgatccaagcgggggtccggtgaatccagatacaatccataacccgaataataacgggccaactcggtaaactcgcctttcggataagtcgtataataggtattaaagtattgcgaagcagtctggtagtctttttgtccataataactttgcgccagcagatacaaagattcttcagcattagctgtacctttaaaaataggcaccagttcatccagcaaagtggcagacttcgaatattgttttgcattgaaatatttctttgcatacgaatatttcaattcgtagtctgtacttttcagtatcttgttatactccccacaggaagataacagaaccgtaatcatcatcaataaaaatacaacctttttcattcacatacttttagcgcgcaaagttaaagttttccaacaaataaacgaagcgcttaacgttaatatttacaacttatataagtcactggccgcaatcagctccagtttattggctttcagaacctccgcacacttctccacattgtcgggacgaatgatcacattggctgcctcaccctgagaaaaagcgtacatatactcaataaatattccggccgaagtaatgatgtccatcgctttagccaatgctcccggctggttggggcaatgtagacaaacaacatcggccacgctcacggcatacaagcgatcgcgtaagaccttgatggcagtatccgtatccgacacgatcaaacgcaagataccgaagtctgaattttcagcaactgtgaaagcggacatgtttacgcctgcttcacctaatatttttgccacttccgtaaaacggcctttcttattttccagaaagatagataactgtttaattaacatgggggataaaatttgatttataactaattatttatgatttatgaactgtcgatagttcacaaatcataaatcagaattctttcctattccagtttacgattatcgatcacatgtttggctttacccatactccgctcgatgctgcgcggctcgacaatccttatatcgggttgcaaaccgattacactctgcatacggttcgcgattttcttcttcaaggcaatcatcttgttcatttcgtccgaataaaactcctgacgcacttctacttgaatctggaatgtgtccgtattgtttacacggtcgaccacaatcagataatgtggttcgaattccggcatttcaagaatgaccgattccacctgcgacggaaatacattcacaccccgaataatcaacatatcgtcactacgtccgagaatacgtcccatacgaactgccgtacgtccacattcgcatttatcataaatcaaatgcgtcagatcgcgcgtacggtaacggatcataggcatcccttcttttgtcaatgtcgtgaaaaccaattctccgtgctgtccaggttctaccggttccaaagtaaccggatccacaatttcagggaaaaaatggtcttcccataaatgcgtaccgttctggcactcgcactctcctccaactcccggaccacaaatctctgtcagcccatagatatcataggccttgatattcagcttgctttccaactctttacgcatattttccgtccaaggttcagccccaaaagcaccgacacgcaacttgaattcttccaacggtatgccggatgagtgaattgtttctgccagatacaacgcataggaaggcgtgcaagccaaccccttagcgccaaaatcatgcatcaactgaatctgtttctgcgtattgccactactcatcggaattaccgtcccgccgatattctcgactccggcatgtgctcccaagcctcctgtaaacaagccataaccgtatgaaacctgcaccgaatcattcttggtcagaccataagcggtcagacatcgtgccaccacttcagcccagatagacagatctttccgggtataaccgacaacaataggctttcccgtcgttccggaagaagcgtgcaaccggacaatctcagacatcggcacggccatcagcccgaaaggataattgtcccgcaagtcctgtttaacggtaaacgggagcttcactatatcgtcaatagaatgaatatcttccggagtaatccccatttcctgcattttcttacggtagaaaggagaattatgataagcgtgttcaacaacccgccttaagcggatactctgtaatctccgcatttcctcgcggttcatacattcgatagtctcgttccaaatcatggtatcagttcgctgtcttttaatgttaatagtctaaatcagttgcaaagtaataacttttttgcaaagaaaccttctttttagttctccttttatgccacctcgtgcttatcttaccgttttcatccgtctccgaacttgttaaaacagcatatatacctttttatagggattatttgtcgtaaaggtatgacataaaatgaagcaggacagcagacaaactaataaacaaaagcataaatgtttgcatacacccacatcttgcgaccttctacatccgggtgtagcgttccatagacccggatgttcaggccccatacatccggatattcagccgaaaatcatactactttactaataataaaatacctatctatcacaaatagcctatgtctcgtcctgaaataggttgacttcataaaagtcaacaaagatgaaaaaagagaagtcattgactcgtcgcaagggtgaaccttatcctttggagattcgcctagcagctataggtgaatatcgcttaggagtaagccgtaaagagatcgcctttaaatattccataagcgaccctacggtaatatcgcattggattcgtaaatttgaggcaaaaagacaatcatcagtgtcaataaaaccactgaaactcaaaaagcgatcaataaaaatgacagaaaacgaatcggatctttccaaacggatcaaagaactggaacgcgccctcaaacaaaaagagttggagttaaaggataaagagaaggaactgaagcatgagcaagctcatcgccgtgcgatggaaatcctaatagaactagccaatgaacactataacatcgatatccgaaaaaactctggcaccaagcagtgaaaaggcttcatgacaatcagccggaaataagtatccctgattgttgttcgttgtttgggtatagcaagcaagcctattataagagagaaaaacagttacaatcggaattgttgtgtgatgaaataatccttaaaatggtaaacagcctgcgtcaggaccaaccggttttaggtggtcgtaagttgtatcatatcctaaaaaccaagatacatcctgatttggatatagggcgcgataagttttttgacttgctacgcgacaatggtttgttgatcagacattccagggtttatcggccggtaacaactctgtcatggaaccgttttcataagtatccaaatctgataaaagattatgatccactatcagccaatcagttatatgtagctgatatcacttatgtccgcaatgtcgaaggaagattctattatttgagtttgctcacagatgcatactcccgtaagattgtcggttgggccctggaggattccctggagatgtccggtccgataaaagcgttgaatatggccttggaaacacttcccccgggaagcgatctgatccatcattcggatagaggagtacaatattgtagcaaagattatatctcaattttacaaggcattaaatgtcgtataagtatgacagaaaacggagatcccagagagaatgcaatagctgaacgtgtcaatggaatattaaaagaagaatggttgaataaagaaatgataacaacgctcggccaggctcgggatatagtgaggaaagtgatcgatatttataacacccggcgccctcacagtagtgtggaaatgttgacacctgaagaggcgcatgcgaagaaggggcctttaaaaagaaaatggaaaactatttataaacgtaaacaagctattcttttatgaacaggattaaactgatatatttgcaacaaaatagaacagagaccggaaacgctcgtcgggacaggtggccctgccccttgccgcttgggcgctccccggccgatgagtttggctgtgaaaagccccctgtcctgtagtgaaacaggataaggtaacttattttaggattaagaaaggattgtctgtttttttacatttatagacaacctataacaggatttttttaatacacagtcaaccaaaatcaggacgagacactatttgattttgtgatagatgtgtgatagatgaaaacgccatctatcacacatctcacgctttaattaacaaagcacacaggcaaaagtgtgatagagtgatagagatttatgaacatcatggattcttcgtcatggcaattacatattattataccataccggtcccggccggttgcccatttcaaactccaatgtatcaccattcataatctgctcatgggtaatatagctcttgtcatacggtcggccattcaacttcacagattgaacatagatattttcacggcttacagccggagccaagaccacaaaagttttgccgtttgccaaatgcatcttcacttctggaaatatcggagttccgatctcatacttgccactgatcggatcaaccggatagaagcccatcgaactgaatacgaaccaagccgacatctgtccgcaatcttcatttccacaaataccgtccggagcattctgatataggttgtgcaggacctcagccacatacttctgcgtcttccagggctgtcctactttattatataaataaatcacatgatggctcggttcgttgccatgtgcgtattgcccgatcataccggtactgaagatcggcaggtcttctgtcgatttcggaacgtaggtgaacatactgtccagtttctcagcgaaacgttccttgcttccgaccaggccgaccagaccgtccagatcctgaggtacagaccagaaatattgccagccattactttcacagatatcttcggtatagtcgtcagggctgaagtttgctgcgaagttccctttctcgtcacgcggctgcatgaaagaagtggccggattataaacattccggtagttctgagcacgtttgtagaattcatcggcgatttctttcttgcccatcttctttgccattgttgcaatacaataatcatcataagcatattccaatgtcttggataacgaccagttctcccatttcttgggatcgccgtaggctgggacataccctaacttcttgtaatcaccgattccccggtaatcatcacggttggccgtagcaatacaggcctcaagtgctttttccggatcgaaattgccgatacctttcagatacgcatccacaattacgggaacggcatgatatccgatcatcatattggtttcccagccatacaaattccacaatggcaaagccccgttctgttcatagaatttcaagaaacctttgatcatatcatttgcacgttctggttcggtataggtaaatagcggatgagaagcgcgataagtatcccacaacgagaaagtggaatagttcgtccatccgtccgctttatggatctgctgatccgggccgtaataggaaccatccacatcactgtaaattgtcggagcgatcatggaatggtacaaagcagtatagaacttcaccaggtcatcagtatccgagcttttcacctctattttagaaagctgcttgttccatgttttggcagcctgcgcttgataataatcgaaatcgtctttcgaaacctccgcacgcaggttcttgcctgctccttccatactgacaccggatatacctgtcgttactaaaatttcctcatctttctccgtattgaaatcgaaacgggcaatataggccgtaccgatcctgccacgatctttcgttacgatagaagttgtgtccatatggcaagccatgaaaggtttcgagaaacgagtctcaaaataaacatgctgcaaaggagaccagccttgcgaaaaacgatatccccggatcgtcatcgaatcgaccacttctatatacgaatccaacgtgaagtcccagttcatcgcctttttgaggttcaagaatacggatgcctctgctttggggaacgtataacgctgaataccgcaacgttcagtcgcggtcaactcgacattaatattgtaatctttcagcagcacacggtaatagccagccgaagccatctcgtcattgtgcgaaaaagtcgaatagacgcccaaaggagcaggtgcctccttatatggacgagtcaccggcatgaaagagatatcgtacaaatcgcccgcacctgtccctgacaaatgggtatggctgaaaccggcgatagtcgtgtcgggataaaaataaccggaaatacggtcccaaccgggaagcccgttgtcaggactcaactgaaccattccgaaagggacttgcgctcccggataggtattacccgtaaagtctgtcccgataaaaggattgacatattgtgtataatcatccgcctcctgttgtttttccggcgtgcaggctgccagagccagcaaggagaccgccaataaggatatgtgcctcatgtttactttatgttttagtcttgacaaagataaaaaaagagacgtacaataaaaactgtacgtctcttctataactattttacgatgtccgtagttttaggccggtgcgatttccgtactatcttcatcctcgtcatctgcatctccattcgtgtcattcttcacaaagaacgcactcaattcgaacaatccatacagcgggaagaatacgatacccaatgtgaacgggtcactacttggggtgataaatgcagcagcaaccaacaaccccacgatagcatgccgcctgtatttgtggaagaacgaacgtttcaacaaaccgatcttcgacaacagccacgaaaccaacggcatttcaaaaacgattcccatcacaaagatcagcatcaggaaattatccatatacgaatccaaagagacctgttccgttatattggcactcaactgataagttgccaaaaagcgcagcgtcatcgggaataccataaaatatccgacagcacatccgataaagaacatgattgttcccaaaagaaatacccatttgacatttttcttctcattctcatacaaagccggactaatgaacttccagatttcccacatcagataagggaaagtaagcacaagtgccaaccagaacgaggtggtcatgtgagtaaagaactgagatgccaatctgatattaaacacatccacatgaaaattatcattacagaaatcaggcagaacatcaaaccacggactgacattgaccaaccactggttcaaatcgcacaaccatctgtaaaagataaaatcggaataacagggtgccaatactacgcggtcaaatataccatcgctaccacgcataaaggcaaaactgcctatcgcaaagataaagagcgctaaaaaagaacggaacagagtccaacgaagtgcctccaggtggtcccagaaggacatttcttcttgttctaattctgccatcttttactttttatcggtatcgtctatcttaatgtcgtcttctaatccttttacaccgtctttaaagtttttcacacctttaccgatacctttcatcagttcaggtatttttttaccaccgaaaagtaacaaaacaataatggcaatgatgataatctcgccagttcctaaatttccaagaaataataattgatccatgatattgtataaattagtcgttaatattcctgttatcgatggggcaaagatacaatttgtaatgaatagtaccccaattattctaaatttattacctttgcgccatcttaaaaaactgaaattagaaaaagattagaaaaaatgaaagcgtatgtatttcccggtcagggtgcccagtttgtcggaatgggaaaagacctttatgaaaacaatcctcttgcaaaagagatgtttgaaaaggctaacgaaatcctcggtttccgcatcacggatctgatgttcgccggaacagacgaagatctgcgccagacaaaagtgacacagcctgccattttcttacactcagtcattcttgcaaaaacattaggtgaccagttcaaaccggatatgacagccggacactctttaggagaattctccgcgcttgttgcagccggagccttgtctttcgaagacggacttgttctggtatccaaacgtgctatggcgatgcagaaagcctgcgaagccacaccctcgacaatggctgccgttctggcattgccggacgaaaaagtagaagagatctgcgcaagcatcgaaggtgaagtcgtcgtatgtgcaaattacaactgtccgggacagcttgtcatctccggctccgtacccggtatcgatgccgcatgtgaaaagatgctggcagccggtgcaaaacgtgcactgaaactgaaagtcggcggtgcattccactcccctctgatggaaccggctcgtgcagaactggctgccgctatcgaagcgactccgatccacaaaccgtcttgccctgtttaccaaaacgtaagcacgaaaggcgaaacctgccctgaaacaatcaagactaacctgattgcccagctgaccgccccggtccgttggacacagagcgttcagaacatgattgccgacggtgccgatcatttcatcgaactaggtccgggcgctgtacttcaaggattagtgaaaaagatcaataaggaagtaacgacagaaggcatgcaataaacagtttgcttcattcatataaaaaggttggtaggaaagttcttcatcgaacacctgccaaccttttctcatatcactacttcagattccaccacaaggcagtctccaccacatccggtccgcccaacagttcgagggctttattataaccttccaggttgttcgtctggatattggccggatagcgataacgcttcggataaaactccaaacggcattcttttgaagtggcaactgtcaagggaacctggttcaacgggttatagtctttttcgacagcctgattctcgaaaaaaggcaaaccgatacggcgatggtcgctccaaacttcctcgggcaaccagggaacctgagcaatatatttctgtgtgaagatcttcgtcatcgcatcgttattatatgcaccgccacgatagatggaatttttcggatatgtataagtcatcgtcttgttctcttttgtgtacggatcaacatagtttacgatataaggctttgcctccgttgtatggtcgaaactgacagatgtcccgatccgattatattcggtagaagacagataagcaccgacttcactcaacaagccgtggtactcgaagctcgcagtcactccgttctcgtagttcgatttgggagaacccggaacatcccaaccacgcacgccggcttcagccagcaagaaataactttcccaaggaccgaaatagacacgtttctgagtactcatgcggtattgcttcgacatggacggatagttatagttttttccagtcaattcggtagccaaactacctttcacatcccattcaccggccacccatgtcccccaagtatatctaggatcgattgtcagcatcggcttcgtgttatcatccggatcgaacagggagaccggtttcacctcgctggccgccccgatataatcggaataaaccacaccatcgttccatcctactacactaaataacttcggtgcacgtggatcgacatattgtggaacgccgtcgaaataaaatccggcacacggatcgttcgtcgtcaacggaaaatgcctatccaaatacaagcccatgtaagtatgcgggttcttcagatgtgctttcaatgaatcaggtagcggaaattcgttacttcccaagccgaccacgagattcttgaatgtaacggacatcgcctgtgcattccaggtacgggacataacgctggtcaggtcgctccatccgtccttttcctgtacaccggcaagttcggaaagtgaagaaatatatcctttggaagcggcatcttcaaactctctttcagccagctgcgggtttgcattcacgatacgcattgccaagcgcatacgcagagaattggcatatttcttccacatattcacatttccggcatagaaagcgtcttcagccgacatcggagacatatcaattgacggggcaagcgcggcttccgcctcctttagttctttgagaataaaagtataaattgcttctacactgtcgtactcgcctggaacgcccgaaaaagcatccaacgccggaatcggcccgaacccgtcagagacctccgagttcaggtaagcccgccagatacgcgccatctggatcacattcttataatacggatagagatcagcttcaccatcggccactttcttctcgcccagttgaacggctttagtcgcctgattcaaccatttcacagcgtagtcgttgctcaggtagcgcgtgatataatcattattatccgtaccgatcgtgaaaccgcttccccgattgaaacgggatgcccggttccaagtcaggataaacatacgttcggcgatctccggattcatctggtcaccgacgatcgaggcattcaagaaccattcaggctttaccttgctttcatccacctggttcggatcttcatttatctcctgaaaatcgttacaggaagaaaacaatgccgccatagagaataggcctgctaatattttattttttgtgttcatattatgttgtttctttttatatcctttacaaaatgattgcaaattatcaaaaaccgaccatccggtcttccggaaaggttttgtaagctttttaaaacccgaccgttacgttaaacgtgaacgaacggctcgtcggagcggccccgttttcgaaaccagtcgcattcgtgttggttgccgaaacggattcggggtcaatacctggcaaattgtaatggatcatccatacattgttgcaggtagcagacagattcaaacgctggaacggcgtctttttcagcatcgctctgttgaacgtatatcctaaagtgatgttacgtagacgaatattggttgcgtcatatgtgaaaacctccggcaaaccgtaattaccggtcgatccgatccgctcccaatagttctggtgagtgaccggaacattgttttccacatatcctccgtctttcctgacaaccgtgttaggcacgacaaaatcctgacgttcaccgttcacaaccgttccggctgcattaccacggacaaataggttggaagctgttgccgaatagatgtcgccaccgatacggaaatcgaccaggaaactcaagttaaaccctttatatgaaaaactgttcgtcaaacccagcatccagtccggactttggttacccaccttgctcttttcagcagagatcagaggtaggccgtcgtctcccacaatcactttgccataatgcggactgtccttgtccgtcacacgcagaaaggtctgtccgtaaatatcaccataataactgccttgtgccgccacgatctggatcgcatccaatgtcttgatgtcataaagcgtcacgcccggatacaggtcgatgatcttattgcgattcaaggagaactgggctgtcgcattccagttgaatccctgcatgtccgggctctggaaaatggcaccgttcaacgagatttccagaccttcgttctggatattaccggcgttcaccttgcgggaactatacccggcaaacgggtcgagcggcaggttcagcaactggcgggtcgcattcgtcttataccaggcgaaatccaaacccaagcggttctgcaggaaacgcacgtcgaaaccggcttcccatgatttgatcaactcgcttcgtacgctcgaatcaaacaagatttggccgggagcagccgtcgtattcccgttttcgtcttttcctaccgtgtaattattgtacaattgatagggatcaagatcattaccgacttccgcataagaagccctcacctttgcaaaggtgaaccactccggcatgtttccgccgatcttaggtaacatatccgagatcacaccggagagactgaccgaaggatagaaataagagcgattgtctttggacatagtagatgaccagtcgttacgggctgtcacgtctaaaaacagatagccgtcccagttcagttgcaatgatccataaagggaattcatcttccggcggatcaactcggaggtaacggtcggtttattaatgccgttgttcaaggagaaaaggtctggaaccagcaattcaccagccgaagcgttcatcttggttcgctgctgcatcatcaggttacctccgaatgtcacgaaaccgcccaagcggtccagcaggttgtctttgcgtgcggtagccaggaagctgtagttattttcgtagaatgtctcagaaccttcattatacaggccgcggggcgaggtgttaccgccggcatatactttctcatttttggtcgtcgtataatagtcggtaccgccacgcagttcgatatcgaaccagttggtcggcgcatacttcaacgatacgttacccaacagacggttacgggtatcattgttctgccggtatttggtcacccagtacgggttttcctgcgggttcttggaggcatcccaccagatcatattgccttcttcatccacgctgctcttaaattccttaacattcaaggaacgaggcagaccgtatatcgtgttgaacgcatttgacgggttcacgccttggatcgggcggttatgggcattcatatttatatagttcactttggcatccaccttccatttctccgccttatcgagaaacgtggtggcacgcaacgtaacgttcgtcttattcagtttcgattccggtgtgataccggcatcatccgaacggttaatagatgcgaagacagaagttccgttaacattctgctggaaactgacgccttcgttaaaagaggttcctgtatggaagaaagcatcgatattatcatatgtctggagaggcacttggcgtccgagccaatccgtcacagtctggccttcagctttcggtccccaactcaaacgggactggttgtcataaactccgaccgatccttgtccgaagctgttttgcatatccggtttcaagaaaatggattcagccgtgataccagcattcaccgtaatccccagcccttcatttttccgtcccgatttggtcgtgatcaggatcacgccgttaccggccctcgaaccgtaaagtgcagctgccgaagctcctttcaggaccgtcatcgattcgatatcttcagggttaatatcagaaaggccgttacccatatcggctccggaattaccccaaacatcatccacaccgcctgtaaaattatccatcggcgtaccgtccaccacgatcaatggctgattgctaccggtcagcgaactgttaccacggagcacgatcttcgaagaacctcccaccccgttactggagcgtacaatctgtaaaccggaaactttaccagacaacgaattggccaaatttggttcgcgggaagacaacaactcgtctcccttcaattcctgcatggcgtaacctaacgcttttttatcacgcttcatacccaaagcagtcacgactacttcatccaatttttgcgtgtcctcttcaagatgtacagacaaagaggcttgtcctgcataaggaatctcctgtgtggcgtaaccgataaaggatatttggataatatccccattttttaccccatccaacgtaaagttgccatccatatcggtcattgtcccgttggtggttccttttataacaacagacgcgccggcaaccggtcccaaagcatcttcgacggttcccgttacttttgcattttgttgggaaatgtcagtgtctggattacctgcacttgaagccgagtatatattcccggagaaacataacgtgctcgcaagcaaaaccatgctgacaggcttaattcttttcaacataactaatgttttttgtttaaattatgatacatgtcttggctgaaaccaacgtcttttttgatatatgtaacacaaaaaaagagaagttgttttgtatttaacctttcgggtaaaagcagatcatgctgaaaaagtaatccgaaaacatattgacaaattgtttcacaaggacagagaaacaagaagaaaagacaaatggagaaatacaagaaacttttttttcgattcgggaacaaaaaataaaaaaggatgcggcaggaaatggttatctgagtgatgaaacgattgcgaatcgtgcatcagatgccttattaaactatatggaagcatgttatgaaaagaatggaaatctggatgccaaagcacagagctattggagagcttttcgcgaacgtgctcatcccgatacggattataataagacaatcgctgctactgttatgagcgaagaggccaaaaatgactggggagaggagagacttattacgctgggcaactggtcaatccaaccttgtataacatcgatcggctgaccgtttgccattaaaaaaccatcgaccataccacgggtcacaccgacaccataatcgcctaaccacgctcctacaccgacacaatgtacctagccgagacctttactatacagcacttcgctataagacgatatatccacagccaagaacatatccatatatgggttagcaggctcctttttcttttcccggccatcccggaccattcggaacgaatgctgtatttttgaatatgaatccatttggtttgggttcttaccgaatcattccatcgaaagctattattgttgtttacaactggttttcctgttctaccgctttttgtaataattacaccaaaggaacacaaaccctgcaaatggaagaaacggcagcatctttcaaagcagaaatattctcaatatcctgcgggttgacagcgttgataccaccttccatgccatcgatcaaaaccaatggactaccactggaggaagattatcatccacattcgtcatgatgccgttagtggttccttttaacaatcacagaggctccggcaacaggattaggctaataggtctgattcttttgaatcataatttgtgttccatgatattgaaagaattactctgattttcataataacttcttattcaatgaaacaagcaggctcacacatctttgtgttttcaatgtttaaaatgatattagttctaaaagaatctcggtagccttaaattaaaaggacaatgagacggttttattttcatgtacaatttactgatgtagaaggtgttgaacgctttcgtagtatacaattctctgcccgtgatattatacaagcacataatgctggtagaaaattggtagctcttctcgtttgtgatcataccgtaaaggagatcaatgcgtattatttagaatcacttaaaattgattagtatgcctattggtgctatagttggtggtcttggctctcttgctggttctatgattggtgcaaatgcccaacgacaggctaatattcagaacatgcagttggctaaataccagaacaactggcaaaccgccgagaatgaaaaggcttatgcccgtagtgtcgaaatgtggaacatgcagaatcagtataattcaccgactgcgcaaatgtcccgtcttcggcaagctggccttaatcctaatttggtttatggtagtggtgttactggtaatagcgctggttcagctccgcaatatcaacccgcgaaaatccaacgtgctacaatggaaccctaccgcggctggaatcttggtttatctgatgctgcgtctatgtatatggcaatgcgtcaaaataaagctcaagttgaaaacatggaagctcaaaataagctcattaaagaacaagctcgaaccgaaggtattcgtcaaggcaatattgctatgtctaccgctcgttccgggtttgatcttaaccttgctcgtgagcttcgtaacgtatctattgatcgtgctatagcagagaaaaatctctccgaagcaagcgctgctggcgcttggactggtgcgaatcaaaaggtactccaatatgaattagatcgtaccctgtttgacaataagattaagctttcgaatgctcaatatgcaaccgcaatggaaggtatccgtaaacttcaacaggataacgatattaatgcgttccgtaatagaatggaacgtcttttcggtgatagttcagatgcaaagaatgttgcttccgaattatttaagcgtatgatgatgtacatgtttcgcgattctcgcgagcttgaccaaatgtttaaccccaaataattttttgttatgagacgtagacgtagaggccgtagacgtggatttctcggtcgtagtagaagacgtagaattcgtggttatcgtgtaagtagaggaggtgttcgcttatgaaaccagtttggaaaattatcattgccgttttagaaacggtcattgatgctgtaaagtcgatctttgacaaacccgatacccctgcgttgaatggctaaatgccttcaccctatgtatcttgccagtgtagaagcgaaagttccttgcggttggtgtgtaaactgtcgtcagaataagcgtcaatcttgggtgtatcgcttacaagcggaagccaaagaatatccgctatcgttgttcgtcactcttacttatgatgatgaacatttaccgatagaaagaattggtagtgacctatttcaaacgaacgttgccgtagtatccaaacgtgatgtacaattgtttatgaaacggcttcgaaagaaatatgaggactataaaatgcgttattttgtcacttctgaatatggtgcaaaaaatggccgccctcactatcatatgatcttatttggcttcccttttactggtaaaatggctggtgacttactggccgaatgttggcagaatggttttgtacaagctcaccctttgacaatcaaagagattgcttatgtctgtaaatacatgtacgaaaaaagtatgtgtcccgagattcttcgggatgaaaagaagtacaaaccttttatgctttgttcccgaaatcccggtattggctttggatttatgaaagctgatatcatcgaattttatcgtagacatcctcgtgattatgttcgtgcgtgggccggtcataaaatggctatgcctcgttattatgctgataagctctatgatgatgatatgaaagcctttttaaaggaaatgcgtgaagagtttttccgacataaaatgttcaatgagtggattgattattgtgctcgtgaaaatcctattcttaccgatctcatgcagcttgaacaacgcgaagagtatgaaaaaagaatgaatgaacgtttaagatgtaaaatgtaatggcaaatatatttaactcgataagaatgaaacgtcctcgtcggaatgctttcaacttatcatatgaatcaaagttaacgttgaacatgggcgaactcgtacctattatgtgtatgcctgttgttcccggtgataaattccgtgtgaaaactgaatccctcgtgcgtttggctccccttgtggctcctatgatgcaccgcgtgaatgtttttactcactatttctttgtgccgaatcgtcttgtgtggaatgaatgggaagacttcataactaaaggcgtagacggtgaagatatgccaatgttcccgaaaattcaaattaatcaagactcgcacttagtttcttcggcttcattaataaaagaatattttggcgattcttctctctgggattatcttggattgcctacgctttctgcttgtggtaataaatcttatgatgttgttaacggcgttaaggttccttccggtttccaagtatccgcgttgcctttccgtgcctatcagttgatctataatgagtattatcgtgatcagaatttgaccgaacctatcgatttcaccttaggtagtggaacaaccgttggtggtgatcagcttatggcgctcatgtcgcttcgtcgtcgtgcttgggaaaaagactattttacttctgcccttccgtggttgcaacgtgggcccgaagtcactgttcctgtgcaaggcgctggcggttctatggatgttgtttatgaacgtcagtctgatagtcaaaaatgggtagattcttctggtcgtgaatttgagaatggccatgcttatgatattactatggccagggctaacgatcctaattctgctttaatggttgccgtcaatggtggtacaaataaccgtgcgcccgaactcgatccgaacggtacattaaaagtcaatgttgacgagatgggaattaacattaacgaccttcgtacttcgaatgctttgcagcgttggttcgaacgtaacgctcgtggtggttctcgttatattgaacagattctgtcacactttggtgttcgttcatctgatgcgcgtttacagcgtccgcagttcctcggtggcggtcgtatgcctatttctgtgtcggaagtattgcaaacatcctcgactgatgaaacgtcaccgcaggcaaatatggccggacatggtatttctgctggaatcaataacggtttcaagcattattttgaagagcatggatatattatcggtatcatgtctattactccgcgttccggctatcaacagggtgttccgcgtgattttacgaagtttgataacatggatttctatttcccggaatttgcccatttgtcagaacaggaaattaagaatcaagaattgtttgtatctgaagatgcagcttacaataatggtacgtttggttatactccgcgttatgctgaatataagtatcatccttcggaagctcatggcgatttccgtggtaatctttcattttggcatttgaatcgtatttttgaggacaaaccgaacttaaatactacatttgttgagtgtaaaccgagtaaccgtgtttttgctacatcagagaccgaagacgataagttttgggtacaaatgtaccaagatgtcaaagctcttcgtttgatgcctaaatacggtactccaatgctttaatattatgcttgaattttttattgttgcattttttagttttttgttcatatgtttgttaccgcttataattttagtaatcttccttcggaacttattcaagaaaaagtaagcgacgaagttctggtagaaccttccgaaagttttacagttcgtgaacttatttaccgcctcgcaatggggatgcctgtttcttccggtgttcgatccggtgattatcccgatcatgaccaagattttgatgatgtattacctacagaggacccggatttcgatttggctgattacgctacattaaagaatgatctcgccgatcgtgaacgtcagcgcaaaattgacatggaaaaggcgtataaggaaaagttggaaaaggaaaagactcccgaccctgctcccgaccctgctcagtaatttgttttaactgtccttgtcccctacccgactggtatccccagccgggtttaggcgtttgtacttgcacctgcgctgatcgcgacaactcgcgaaagcggacgtcgtcttggcatggtctttctcgcgacccaatttaaccaaaacctttacgtgaaaaattcacgtttttcaatcgatcgcgaagcgatacctatctgccgaaggcgtctgtaacgacaatcatagcgacggtgaaaattggcaacgatagttgcctgcgatcgcgagacggtaccaatagggtagaacaaagcgtagcgacgtgataccctgaggtacccgaacgcgatcgccctcaatggagtagacctgtttatacgcttataaatagaataaatagaatataaaaagtgttaacgttataaatcaatactttacccccttttaaagggggataatagggggttgtatgtacttgtgcgcgcgtaataggtaacttgattaattatgcgcgcactgacacctaaacggattttaacaatccgtttttttcagtgtggaatattttattttctttgctgcataaatcacgctaccatagttctaaaagaactatggtatttttagctttaatacattttgatacaacttcataacaatatgattttcaataaattaaacaagtaaaatatattatgcaataattacttaaaatacacaagtctctttaaattacttctgttaacaaattagcagaagtacgaccatgttttttatttatctatttttatatagttacatatttccaatggatacattattctgataaacagaataatacctgtgtaataccaaaagagtaaaatgttaaaaaagaaacttctacgtattttttttagaaaaataacagtacaacggaaaattttcatatctttgacaccgatatgaaatgtgcagagttcttttagaactaattacaaacacagataaactttatacgcaaaagctaaaaactctaacattttgtatatatgatgtagaaaagcgataataagcgccatcattttaattaaaagagcattctttcaattaaatataagacacaaattatgttgaaaaatttcaaacctatcagcttaatcttgctggcaggtgccacttgtttcccagcaagtatatttgcagaaacaatgccctccaagcaaggtatgaacatttcccagcagaacggaaaagttacaggtactgtggtagatgatctagggcctgttgccggagcatcggtcgtagtgaaaggaacaaccaatggaaacattaccgacatggatggtaatttcacattggaaggtgtaaaaaatggagacatcattcagatctctttcattggttacacaactcaagaaatcaaatacacaggacaatccactcttcaaatcaaattagcggaagacactcaaaaactggaagaagtcgtagtcgttggctatggcgtacaaaagaaggtaaacctgaccggcgctgtagggattgcagatagcgaaattctggaagatcgtccgatcggaaacattgcacaaggtttgcaaggagctattccaaacttgaatattgatttcgccagtggtaatccaaatgcagctactacatttaatgtacgtggtgcaacttcactgaatggaggacaagcactattgttagtcgacggagtcgaaacatcagacttgtctttgcttaacccacaagatatcgaaagcgtatcagtattaaaagatgctgcctctgcttctatttatggtgcccgtgctgcttttggcgttgtattgatcacaactaaaaaagggaaaaaagaacaaaaagttcaaatcaactacaataacaacttttcttggtcgatggcctctcgcttaccggatggtgtttcttccgataagtggattcgtgccatgaatcaggcaaacgtgaacaatggcagcggacagtatttcaaagatgaacacgttcaggctgtagatgatttcattgcgggaagaggtccttctgcattttatacaacagacaattcaataactgctgccggacaatgggcttatgctgggaacaccgattggttcgacgtaatgtacaaaccgtcattcatgcaacagcataatgcaagtatcagcggtggttcagacaagacgacttactacggctctattggttataaaggacaagatggtattttgcaatatggtacggataaatacaaacgtattaatatgtctttcaacttttccactcagattacaaaatggttggaagtaactttccgtacaaaatataaccgcaatacaagtgattatccctacaccagtaattttaatttaggaaacattttttacgaaatctatcgtggattcccaactattcctgtttacctaccagatggtaataattttgcaggtatagcaggtagcaacttcaactataactttgctggtttactagatggagctgggcgagacaaaaccaactcggatgacttttggtacactgccgcctttaatctgacaccgttagccggtttatcaatcaagggagattataccggaaacaaattctatcaagatcaaacccagcacggcaagatactgtatcagacaatgccagaagaaagtacgttatctccgctatccgttggtacacctggaggtgtaacaaaagctaattacggagatacttatcaagcattgaacttatgggctgactacaagaagtcattcaatgacaagcacaatttaggtgtaatggtcggttacaaccaagaaagcaaaaagacgactaaattaagcgtaagcactagtaatctatttgataacaatttccctgtcaccgatttggccagtacttataacatgccaagtgaagaagcaacaatctgggctgtacagggtgcgttcttccgtttgaattatgattacatgcaaaaatatttgcttgaggtaaatggtcgctatgacggttcatccaaatatatgtctggtgatcgttggggattctttccctcggtatcagcaggttggcgtatctctgaagaaagtttcttcgaaccagctcgtaatattttcgacaacctaaaagtcagagcttcatatggctcattaggcaatcaagttacagatggcaatttccaatatttaagtttcttgacaagcgaatctttggcctatctgatgaacggcggtatcattagtggcttgaaagctccgacattggctagtacaaacatcacatgggaaaaagtttacacaaccaatatcggtttagactggactatgctgaacggccgtttcactggatcttttgactattacatccgcgatacaaaaggaatggtcgtaaacaaaacttacccggctgtattaggaacgacaggaggtaaagagaacttggcagatatgagaaccaaaggtatggagttatctttaacgtggaacgatcagatcaaagacgtggccggcagtcctttggattactctatcggcatcggtatctcagacaacacttctgagatcacgaagtatgataacccgacattaagtttggatgaaactcattaccagggaaagaaaatcggtgaaatttggggatatgtaacagatggcttcattaaagatgaagctgaagcccaagaaatggccaataaacaggctttcatcagcacaacttggaaaccaggagatattcgttatgcagatttgaacggtgatggaaaaattgaccgtggaaataatcgtgttggtgattcgggcgacaaaaaagtcattggtaatacaactccccgctacaatttcaacctcaacttgagtggttcatggaaaggttttgacttacgtctgttcttccaaggtacaatgaaacgtgacgtatggttggactctcctgtattttggggatacaagacaggtatttggtgggctaacttaaatgattacatcatcgataactcttggagtgaaaccaatacgaacgcttactatcctattccaacttggagtgatagaagtaaacaaacacagacaaaatatctgcaaaacggtgcttttatccgtctgaaagatgttacattaagctacactattcctaaagcgctcatcaataaatacggcattggtcagctaaaagtgttcgtaagcggtcagaatctttgggaagctacaggattgtacaaatacctcgatccggatgctgtaggcagacgtgacaataacggtaacttgaaagttgacgacaacggtagtgtttacccgttcacccgttcttattcatttggtatcaacgtaacattctaaaaacagacaaagtaacatgaaaaagtcaattatattatttggtggtttattgttcctcacaacccaaagttgtgatgtactggataaagagccattagactctatcagtacacaacaatactttgcaaatgccaatgcacaggcattagagcaatattgtaatgatttatatcccaaattaatcaccggacatggaaatccgaacgaatataattttgggatgatggaaactgatttccagtctgatgacctacttccgtgggacgcaaactctgtagctttcagtcaacacagcatttctacagcagacaatgacaattggaaatgggaaaatattcgtgcttgtaatgcttttatgcaagattacgaactatccccggaaaccgaggccgtaaaacatcgttatgctggtgaaattttattcttcaagacattggattactttaataaagtaaaacgctttggcgatgtaccttggtatgacaaagtattggttcctggagacgaagacctatacaaaggccgcgattcccgtattaccgttgtagcaaacatgataaaagacattgatcaagcgattgaatggttacccaaaaaagaaacgacaggtgtctaccgcatcagcaaagacgctgcacttgcattaaaggcacgtatatgtttatttgaaggaactttccgccgttatcataatatggaaggtgataccgaattgctcaaagccgcttatgaagcagcaggcgaactgatgaaatccgaatatggctattcattgttccaaggttcaaaacctggtaaagcctattatgaattatttatccaagcagattacaactccaatcctgaaattattctgtcgaaggaatatgatccgactgtcggcaaaggaaataacttaagccgccaaattgcagtcggtgaatctcctatcggtttgagtcgtgacgctgttgaagattatttgtgtgcaacaacaggaaaaccaatctctatgtgcggctgcgaaggccactctcatcatactacattaatcgccgaactaaagaatcgagatccgcgtttactacaaacagtaccgactcccgaagctggtgaatacacctattacctagaagggaaacgtccggatatcggtaaatataccagtggaagtgttagtacatctacgggatatggtgttatcaaatattacaatccgtcagaatacacatcatctcatcatattggaacattagacgctccaatcttccgttatgcagagattcttctgatacgtgcagaagcaggagccgaacttggccaagatcccgaattagataaaacaatcaacgctttgcgtgatcgggttggttttaatcaccatttgacaacaaatccgattgaagacccgaaattggtcgccgaatatccaacaatcaaaggcccgaacgccaacttgatccgcgaaatccgccgtgaacgtcgtgttgaactaatggcagaaggttatcgttatcacgacttaatgcgttgggcctgcggtattcgcctgaaccaaccgaaattgggtatcattccagacaaagcaacaagtgagaatgatttaaatggatataatacaaaagattatgaatccattaaatccggattaggtttcgtagacggtgccattgatgtttatacaaaacgaatgacaaatcctgttccaaactttatagatcccaagaactatttgttctctattccgacaaaccaaatcggattaaatcccaatttaaaacaaaatccgggatgggattaattgaaatattttgataattttttttcaaaaggtctgctcttcataacagaagggtggaccttcttgtatttgaaaaatccacattatttcaatagcttttgattttaaggtccatcttcacaacttcagcaaacaattcatatatatcaactccctataaatactgaaataccaagaatatgaagtgatttaagactacacaattcacatagttcaaaacaactatctaatcagttacaaagaaagtgaaagaggtaagtgctaccttcttataagtctattaaatgagacagtaatcatacaatatgatttaaaaaaatacatacagcttattggctatcgaggaaaaggcactgacctacagagagaagatgtataccttattccacaaaacaactatctttctataaatggataatacttcttttcacagccagaagatatcgagttcaaaacatatatgttttaaaaacgaaacacctatgttttgaattcgaaacataggtgttttgaaataagaaatataaacgatcacatcaatagtctttctcattcgccagattccacatattcagaaaagaggctttcgttatgtcgacaatcttattccagtttatcttttccacatggtcgcttggcatatgatagtcaggatgaccatccgtatggtaccagatgaccggaatatccaaaagagcgaacgaagcgttatcgctcccccctaccggcttatcccacggacgataatcaggagtcagattcaagccatatttcttgatatcgtttttcaaccaatcgccaaacacaggatgcgcttccgtatagaaataaacgacatgcatcggcttggactcgtctttattacggccaatcatgtcgtaattcagataccccttcaccttatccatctccaagaatgtctgcacgaaatatttggagcctaacaagcctttctcttcaccatcccagaaggcgaaaataacggttcgctccggttgaacccccgtcgctaaaaacgccttagcgacctgcaggacagctgaaacacccgaagcattatcgtcggccccgttatagacccggtcaccgtccagcatcgggtcaaagccgagatgatcgtaatgggcgccaataatcacatattcgttcgggttcttaccctcgatcttccccaagatgttgttcatcgacaacttctgatgaacaccttgtttcaacttcgcgatcgaatccggatgaacctggaaacggcccttcttctgccgttccttgttataagcctcaaaaggttggtaataggattcgaacagaggttcgatccccatcgttttcaaattagatacaatatattcaccggcaatacgcccaccacggaaaccagcttcacgcccttccaatgcatcgcttgccagaaaaccgatataggcctcggcatttgccctgttaatgacatccagccctttcttttcaggcaactcggcccatagcgtagcacttagtgcaatagaggctaaaaacaatcccgtttttctcatttcgatattgtgttttacagattatagttttctacattatgcaaatatacggatatttgtatacattcgaactataatgacagaacacaaatatgattttagtgtggttgtagacaagagcaggactgacttcattaaaataaaaaaaggccaaactccgctatctcataagcgtcgaatacctcccccttttatctctcaccagtctttcaaaagactacggtgaagagactacatctaacaaattatttactgtttaatactcaatttttagagctttcgctcatttggctcaccaatctgcgaatctcagcatttactcgctggcacattgaaccatttcctactgactgataacgatcagcctgataacgcaacatcgctaaagtacgcatacttttttcgttttctctcatcatcataattttactcatttaagttctccacgcttggagaacgattaataataactaaacctaaactttctttttctttttgtttacagtgcaaagataagtattttatttgaatttatgctgtaaaacatattcgatgtctactatttaactatatttaggttttgattaaatacttttcatctcgatttatctaaacgacagtagccaattcacctgtagtcgagtcgattacaaatccgcggaccgttatatcttttgggatcaacggatgtttttgtacttgagccactgtttcacgaacggaaccttccggggtgtcgaacccacgcaaccacgatttgaaatcaatgccgcagtaacgcatcatatcgatatgctccgaagggataccacgcttcttcattacctcaatcatctgttcgctgtccatatgcttggcaccgcaatcggtatgaccgacaatcatgacttcgttcacacctaattcataaatggcaaccaacagactccggatcacacttccgaaaggatgggaaataatcgccccagcattcttgatgatcttgacatccccgttctttattcccaaagctgccggcagcagttccgtaagacgcgtatccatacaagacactatcgcaattttcttatcaggatatttattggtgataaacctctcgtatcctttactctttacaaattcacgattaaatttcaataactcgtctatcataactatcttatatatatgtaacagttcaaaatcaaataatgttgaaatgtttcaacgcattgtatacaccattctcgtcgacagaggtggtcacataaccagctgcactcatcacgtcttcggccgcatttcccatagcaaccccaatcccgacatggctaagcatctgaatatcattaccaccatcaccaaaggccatacattcgtccagaccgatatggtaatgttccagcattttgtcaatcccgacccgtttactgcttccaagcggtacgatatctgtaaaaagagggttccaccgcgtggattcacaatgcgacaagaccttcataatacgtttctcctgctctgccgtaaaaaaggcgatcaactggtagaccgtctttccataaatatcctcgatcggacggattggaggagccgggaagttcaacagatgaaacacatcattgaccgccttatccgtatagttcataaaaatctcgtcttcctgcacaaaggcacaagggaattcgccttctttttcctggtaacgaaccaaggcttcgatatccttatcgggaatgctatgcttataaagcacatcgtcctttccggcaaacacatagccaccattcaaagttacatatccatcgaactcaagatcgcccagattgttaatcgaacggcgatgacgaccagttgctataaatacttttatccccttcttcttcaacaattcgatcgcatgaagggtagatttcgggactacatgtgttttaaagctgaccaatgtcccatcaatatcaaaaaatactgctttaatcataacctaaactcattaccttttaaacctcaacaaaggtaagaataattacggatttccaaaggtcatataaaatcactatatttgaacgctgaaacattttatttgcaaacatgaaaacacatctctacttattgacaatactattcatatccgttccatccgtctttgcacaagagattgagaaagaaaccgttcctggacaagaaccaactttggtcgaacgacttacaggagggaaaaaggtgattgaaagcgcagaaatgaattttcagctttttacttcggcaaacgccaatttcatcggttccgatttcgacggcatgaacttcaagctgaatcgtgtccgattggaaataaaaggggatgtatggaaaaacctttcctatcattaccggcagtcgtttaataaatattcggacccttattcgctggacaatctttcgtcctcgctcgaattggcttatgtcaacctgaaagtacatgacaagttcggctttacgatcggtaagcagtttgtcaatttcggaggatacgaatattttgtcaattcgataaaagtccgtgagttcagtgagttcaacaacctactgacctgctatcaggctggtatttcaggcaactggcagatcaatcctgaccacgaactttgcttccagatcgtgaacaaccgaagcggacaggacaacgaaatctacccgaccggattgcccgacaacacacgagaagcaaaagttcctttcatgtatacggtaaactggaacagctactatttcgaccgcgtcctgcaactccgttatgccgcttccgtagggcaacagacaaagaaacgttattcctattacttcacctgcggcaacacgatcgagaaaggacctctgctgacttatctggacatcatgtacacccggcagggattggaccagcacggcgttatcagccgtctgccagagacagcccagacagcttgcaataccgagtatctatcggtcatcgccgatgtggactaccggattcacccgcgctggaacctctatgtgaaaggtgcttatgaaaccggaaaagtgtacaaggcgaacggaccatttgccaaaggcatgtaccgccgttcctggaatgcacagagcagtctcgaatttttcccgatcaagaacagtgatcttttcatctttctcctttatacatatcgcggcgtaaaacttgaaaaagcagccttggatatgggagcagtcgatcccgacacgcatcgtatttcgttagggctggtctattcgattccggtattctaaactttctctttcaaggcagttttgccaccctctattcccagaaatgaaatcacaatgagggtgtcaaaatacctttgccatggccttttaggaacggatttacaagggatcattcaaacaaagccgatccaatcaaattataccggaaatttttattatcatagacctccaagcctttaaccttgacaccgatcagtgtcgagcgatatagattctccacgttgagaacattgtattttccttttggcagctccatatacttatctaagggctgcaaatagacaaccgtatataccaacgggctgacatagccgttctgaccggttcctctgctccgtttctcgtatttttctgcatcatccatgctcacagggataaagaacgcctgatccggattaaccggcataaaattgaaaccgttgaaaggaatacattgtttgggagaactgcccgaacgtgtcggataggacaatggatagcctttatggtcaaaatcataaccgttatggttattgttcacttttatgaaataagttttcgtaaaatcaaaatcggccattcccttttccaagcgagcctgatattcgcctttcagtttacggaatttaaactgatcgcgccggcattcctgccccaattctttattgacgacactgatataattcaagaccaccttgtcgtctatcggtaatttattgacacgaacacagcaaataaacatttgttcgagcgtcatctcctcgcattttataacaggttcaggcatattcacgacgatctcgccttgttcgatcgcacgatcaatctccacgaacagtttcttatcgggagctttctcactttccaaggcaaacacgacagcttcgttcaggaacatattcttatcttccggccggataatctcacggattgttaccttggagaaaggcaaatcctttccattgaacgcctcataccgaacctttccataggtatccgtatacgcgtatttcaaatggctatacttagtcgaactcagatagaaatctccgagagtaagcacatcaccggttttgaatgtatctccactatacgtttcatacgattcctgtgcataaacagggaaaagaaggaaagataagcaaaaaagaaggcataaaaaatgtttcatattcattagattagttagacctttatttcgttaaaacgcgataaagataaactttttccaaaatatatgaaacaaatgatattacaataaatagacatcatttatatccagcttgaactgcaggccaagaaattcagctgctttcctgcaaagtagcatccgtccggtaaaaatctcgaaatagtccatcacggcacaaatttcagtattgatctttaaatcgagagtgatcgttttcgaatccggctccaatataacatccgatttttcggctgcataatttacccgatcatggatatcgaaattaatcgtggaacggttacggacacggctgcgacgcacatccgtcttatcagcgattatcagagcagctgcaacggcatttacagcagcagccgtctgttcgtcatggtttccgatagctgtaataacggtcgccacatcttcaggcggcattcccatcttatccaaaatacgaaaagccatcatagccccactttgggcgtggtcgatgcggttcaccacattgcctatatcgtgcatgaaaccggcgatacgagccagttccacctcatgcgcatcatatcctaacttctccaataaatcccctgctactttcgcaaccttcgtgcaatgggcaaagctatgctccgtgtagccgattgctttcaacgactcgtccgcttgtttgatataagtccggatctcttcggaattgcggacatcttcatatgttacattcatatttttatctttactatatatgttaattaaacacagaaatattccattttgttctgccgaagaaccagaaggacatgaatttcatattacaaaagccttttaccggtctttattggaataataaaaaaagcggaatctcatggtgagactccgctttctattttattcgggtgaaaaaaggatttccacccttagatgatcataatcaaattattcttctacactccagttttcagcagccatacgtttgtagctacgcagacgccacttagcgttttcttctgcggcagcaaacaattcagcagcttcagctggatactgttttgcaacagatgcgaaacgaacttcacctttcaggaagtcttggaatttactccaatccggttctttggaatccaatgtgaacgggttcttgccttcagcttccagagcaggattgtagcgccacaagtgccagtaaccacatgcaacagcttctttttcttcagcctgagatttgcccatacccttcttcaaaccgtggttgatacaaggagcataagcgataatcaaagaaggaccgtcataagcttcagcttcgcggatagccttcaaagtctgagcctgatcagcacccatagcgatctgagcgacataaacgtaaccgtaagtagtagccatcaaacccaagtctttcttgcggactctcttaccggctgcagcaaacttggcgattgcaccgaccggagtagcctttgaagactgaccgcctgtatttgaataaacttcagtatccagaaccaggatattcacattcttaccggaagcaatcacgtggtccaaaccaccataaccgatatcgtaagaagcaccgtcaccaccgataatccactgtgaacgttttaccaagaagtggctcaattcggcgatagtagcgcaattcggacatttatccttagctgcttcaaccatcggaatgatcagagctgccagttctttcgtcttatcggcatcgttctgattttcgatccatgcagtgaatgcttccttatattcggccggagtgccttcataagcaatggcagcttccattgcattctggatacgtgcacgcatcttttcgttagccaattccatacccaaaccgaattcacagaagtcttcgaacagagagttagcccatgcaggaccttcacccttttcgtttgtcgtatacggagtagatggaacagaacccgaatagatagaagaacatcccgtagcgttagcaaccatttcacgatcaccgaacaactgggaaatcagttttacgtacggagtttcaccacaaccggagcaagcgcctgagaactcgaacaacggagttgcgaactgagaattcttcacattagacttgatgtctaccaaactctgcttagaacttacattagccacacagtatgcccagttatcagcttcagccaactgaccttccagcggagccatagacaacgccttgttgcccttgaatcccggacagatatcggcacagtttccgcaacccaagcagtccataacatctacctgcatacggaacttcatccccttcattgtagccggagctttcacatccaacatcgggaagtttgcacccttctgttcttcgtcattcaaaacgaacggacggatagaagcgtgaggacaaacgtaagcacactggttacactggatacagtttgcctcattccaaaccggaacaaatgcagctacaccacgtttttcatattttgcagtaccctgatgccatgtaccgtcttcgatgcccttgaaagcagaaaccttcagtaggtcgccatcctgtgcattaataggacgaaccacttcgttgataaatgcaggatcgttgtttacaacctcttcatcatccggcaggttagcccatgcaggatcaacagtcaactggttgtattcgccaccacgatcaacagcagcatagtttttgtttacaacatcttcacccttcttgccataagacttcacgatgaacttcttcatctgttcgatagccagatcaacaggaattacacctgtgatacggaagaatgcagactgcaggattgtattggtgcggttacccaaaccgatttccaatgcgatctgtgtagcattgatataataaaccgtaatatttttctgagcgaaataacgttttacacggttaggcaggtgttttgccaattcttcgccattccataccgtgttcagcaagaatgtaccgttctcacgcaaaccgcgagtcacatcgtacatacgcaggtaagcctgaacgtggcaagccacaaaattcggtgtgtttaccaaataggtagagcggatcggatgatcaccgaaacgcaggtgagaacaagtgaaaccgccggatttcttagagtcgtaagagaaataagcctggcaatatttatttgtattgtcaccgatgatcttgactgaattcttgttggcaccgacagtaccgtctgcacccaaaccgtagaacttagcttcgaacatgccttcgccacccaatgcgatctcttctttctgaggcagggaagtgaatgttacgtcatctacgataccgatcgtgaactggttcttcggcatcggcagtgccaggttttcatatacggaaaggatctgggcaggagtcgtatccttagaccccaaaccataacggccgcctacgataaccggagcatcttcctggccatagaaacagtcttttacatccagatacagaggttcgcctactgcacccggttcttttgtacggtccaaaacagcaatacgcttagcagtcttaggaacagctgccaagaagtgtttagccgagaacggacgatacaagtgaacggaaaccaaacctactttttcacccttagctgtcaggtagtcgatagcttcgcgtgcagcttccgtaacagaacccattgcaatgattacgcgttctgcatcttcagctccgtagtaatcgaacaaaccgtatttacgtcctgtgatcttggagatttcattcatatattcttctacgatagcaggaactgcatcatagtaagagttgctcgattctctatgctggaagaagtggtcagggttttcagccataccgcgtgcaaccggagttttcggattcaaggcacgtgcgcggaattcagccaacgccttctggtcgatcagcggagccaaatcttcattttccaatgcttcgatcttctggatttcgtgagatgtacggaaaccgtcgaagaagttcacgaacggaacacgggatttgattgtagccaagtgggcaacacctgccaaatccatcacttcctgtacagaaccttcggccaacatggcgaagcctgtctgacgggcagacattacgtcttgatggtcaccgaagatacacagtgcgtgagaagccaatgtacgagcagatacatggaatacgcaaggcagcaattcacctgcgatcttgtacatgttcgggatcatcagcaacaaaccctgagaagccgtataagtcgtagtcagtgcaccagcctgcaacgaaccgtgaactgcaccggcagcaccaccttcagattgcatttcctgcaccattacagtttcgccgaaaatattcttacgtccggcagcagcccattcatctacatattctgccatcgtagatgacggagtgatggggtaaatcgcagcaacttcactgaacatataggagatatgtgcagcagcctggttaccatcacaggttaaaaatttcttctgttttgtcatagactcttactattagtatttaaaaaaatttcaatataaaaagccgaaaagccaaagcgggatcatgttgccctctcctacttcgaccttatcgattgcataatacagatcaggattattcttcaccttcatgttttcttcaatcctgaaattatgcatcccattgactaagaaatgtgcattcttcccgccctcattcaatttattatccttcaaaagctggttataaaagaatgattcgcggacagactgcatattcacttccatcggccggatgggatacatcaaattggagttatacatatacactttagagggtttcttggggaaggactctcccaccggataaagtatgttcatcaaacgggcatcggccaaatatttgatatagttcatcacggtggcccgcgaagtctctatgtctttgctcaactgactcacattgggcgtacaaggagcgcttgtcgccaacaggtaaagcagcttacgcagtttcggcagatagctttgttcgatttgttttatgtataacacatctacctccagcatcatattcatggtctttagcaaattctccgagaaattgcgcttctccaagaagaacgggtagaaaccatgatgcagatagtcctgaaagtatgccatcggttttcccaccgagcagatgcctttcgcaatctcctgatggtccaccaatatttctccaaacgtataagctggaaaactgttcccggacatcagattaaaaaattcccggaatgagaaacctcgcaggttatacgaaaccaccttacctgacagatcgggattttcatctttcaaccgcatgacggaagaaccggaaaaaatgatcttcaaatcagtgaagttatcgtaacaatagcggagttctttcgaccatcccgaatatttgaacacttggtcgatcagcagcacttttcccccttttgccctgaactcagaagcaaaatcgaccaacgtacgttccgtaaaataaaaatgattcagatttatgtaaagacactctttattatccgcgccaaaatgctcgcgggcataatccagcagaaaagtcgtctttcccactccgcgagaccccttaataccgatcaaccgatcattccagtcgatctcgtccatcagccctctgcgaaccggcgaatacaagtgttctaccagatatttatgtgttttaaagaatgcttccactttttcaattgacaattaacaatggacaattgacaatttatccatcccgttaaacgaggcaaatatagatattttttccgaattgcaatgcagagtttgcaattttgataaaaaacatctattccaaattatcaattatccattttttattgttaattattcaattatcgttatccacccataggtatcaggttcatcgccatactggatagcacgcagtttattgtatagtttttcacaaacaggacccggtttgccgtcttttgcaatcacataagacttattgacatccaaatcatcgatctgtgaaatcggagcaataaccgcagcagttccacattcggcagcttcatcgaacgcagcgatttcttctaccggaaccggacggcgttccaccgtcaggcccatatcggttgccaactgctgcaaactcttgttcgtgatagaaggcaggatagagtgagactgcggagtgatgtagctgttgccacgaattccgaagaagttggctgggccgcattcgtccaaatatttcttttctttcgggtccagatataaaacagcggcgtagcccagctcatgagccttttcgcccgcaacgagactggcggcgtaattaccaccgactttgatcgtaccggttccctgaggggcagcacgatcgtaatcgcgcatgatacatactttggagggtttgaaaccacccttaaaatacggtcccaccggcgtcacaaacaccatgaacatatattcgagagccggcttcacacccacctgggcacccaaaccgatcatcaacggacggatatataaagcagccccgctttcataaggggggacaaaacgttcgttcagttttacgaccttacggatagcttcctcgaacttctcaacgggcaactcggccattttgataccgcggctggaagattgcatgcgtttgccgttctcatccatacggaacacacggatcttgccgtctctccctttgaacgccttcaatccttcaaacgactcctgtccataatgcaaacatgtggcagccatatgaatattgatgatctcggaagaactaacttcgagctcgccccatttaccatcccgatagtaacaccgtacattatagtctgtcttcatataaccgaatgacagatcagaccaattaatattttccatatcttatcgtaattagattattgacaggcaaaggtattaataaaaaatgaaaaacggcaaccgttactcatttaatcctcgcaggaaaataatcccgcaaattgtcgcaatgcgtacaggcaaattcggctacactcttattgtacaccttgcctcaaatctcattggtccaaatcgaaactactgctgcatctaattcgattttataccccatttaattcaaattacacgcaagggtaatattttttaacagatataagattcctacacctcactatcaatcaagattttaacccaaaatcgcattttaaagagagatattgtctattttaacactcatttaccccttcaaaaacggcaaaaataacaagaacgatagatgcaaattgcagattatatcgtatctttgtgaagaagcaacaaaaagacatgatggaaactcagcaacgaaacacagaatatcgacacgtggaaaattcaaacaacataaacaatcaacatattgggcagacaaacataactgttttttatgtacatttgtccacccaaataaataaataacatgaaagtaatcgatctgatcaatagcagcaagagtactgctttctcatttgaaatacttcctccgttgaaaggaaacagcatacagaaagtatataatgtcatagacaaactgatcgagttcgatcctaaatacattaatataacatcccatcacagcgaatatatctacaagactttgccagatggtagctttcagaaagtcaacatccgcaaacgtcccggatcggtcgccatcgcttcggctatccagaataaatatggcataacggctgttcctcatattatatgcaagggatttacaaaagatgaaacggaatatgcattgatcgacctgaactttttaggtgtttatgacctgttgttgctccgtggagatgtaaaaacactggaagccggacaaaaaacggacatataccacgaacatgcaaccgacctccagcagcaagtgaacgacttcaacaaagggatcgccatcgacggatctgttttcgaagccaatgaaacaccgttctcttacggaatggcttgctatccggaaaagcatgaagaagcccccaatatggaatcggatattttctatctgaaagagaaagtaaagaacggggcggactatttggtgacacagatgtttttcgacaatgaaaaatattacgcattcgtagaccgatgccgggcggaaggcattacggtccccatcattccgggtatcaagccgatcgtattcaagaaccagctcaccgtgctgcctaagatattccgttcggacattcccgaaccgtttgcaacagaacttcgtaaatgcaaaacggatgatgaagcgaaagccgtcggtgtcgaatggtgcatccagcaatgcaaagacttgattgcacacggcgttccgagcctacatttctatacgatgatggcatcggatagcgtctataaggtggcaaaagaggtgtattgaaagcacgaaaacattgtttcatgagcacgaaactatatttccatgcctatgaaacgatgttttcatgccgaaggaactatattttcaagcaatcgtaatctccccgatcagcgaacaattcagatgttcctttacttcgtccggcgtcataccatgcccgaacaggaacatcagcttggcaaccgcacattcggtcgtgctgtcgtaaccgctcaccacgccggcctgcaacaatttgcgaccggtttcatagcggtgcatttccacgctcccggcaaggcattgggtgacattgacaatgacgatcccccgttcgaccgcatccttcaacatctccagcaaccagtcatatccgggcgcattcccgctaccgaatgtttccatcacgacgcctttcaagccgggaatattcaagatgctttccacaacctgcggagaaattccaggaaatattttcaagattgcaatattccggtccaacaagtaatgaggtttcagcggtttccgggataccggatggtaaatctgggagacatcatacttaatcgaaataccggcatgtgccaacggaggataattataggaacggaacgcattgaaattatccgcattcgtcttgctggtacggtttccgcgcagcaggtcgttctcaaagaaaatacagacttcaggaaccagcggcatatcgttttcacgggcggcggcaatctctatcgccgtaatcaggttttcctttccatccgtacgaagcataccgatcggaagctgtgaaccggtcagaaccaccggcttactcagattttccagcataaagctcaaagcggaagcggtaaaggccatcgtatcggtcccatgcagaacgacaaagccatcgtaatcatgataatgttccgcaatgacatgcacgattttcatccatgaatccggtcccatctccgatgaatccatcggtggatcaaattgaatagacgatattttatatccgagatttttcagttcgggtacatgctcctccaaatgttcaaaattaaaggcctccaaagagcccgtctcaggattttctatcattccgatagtacctcccgtatatataatcagaatagaagcgtcatctttgcatacattcataatacaatccgtatttatgtaattttcttttttacaatgcaaagataatactatcattttgaaatcaaataccgaaacaaaacaattaaaacatattcaaaactatcttcacaagaataatcataagaaaaaatattacattttgtcaactgcaaaaaaaacacaaatcaccgtctcagtttttatcgatcaggcaatagaagtaagcaatacaccaaaaacatacaacaaaatgaaaaaagtttgttatcggataggggtttttccaagcatcttagtcttatcgacgaaataataaattttacgaagatgaaatacatactgtttatcgcaatggatttggccttatatccttttttgcttgtgctttttattggtaaatgcattaaagagaaaatacagatcgcacattaagatgaggtttcttatttcctcgattattcgtacctttgctctatcaactcaataaggagcaacatgtacttcaaggatattatcggtcaggaagaaataaaaaaacggcttatacattcggcacagacaggtgtcgtcccgcatgcccagctattcacggaacaggggggtgcaggcgcctttcctctcacactggcttacgcacgttatctgaactgtacgaaccggacggaaacggattcatgcgggcattgtccgtcatgcctgaagtataacgagttggcccacccggaccttcatttcgtgttcccgatcgtttccaagaaggataagaaaaaagatgtctgcgacgattacctcaccgaatggagaggtttcctgaaagaccgtccctatttcgatatagatggctggctggattatatcgatgccggcaactcacaagctctgatctactcgaaagagagcgacgagattatccggaaactgagccttaagatatacgaagcgacttaccgcatcctgttggtatggctaccggaaaaactccacccgacctgtgccaacaaactcctgaagatcattgaggaacctccccggaacacggtgatcctgatggtatcggaacttcccgacctggttttaggaaccatcctgtcccgtgcgcaacgtatcaacgtacgtggcattcatccggaagatatcgccgcctccatgatttcccggttcaacctgactcccgaagatgccaagcatgtcgcccatctggcaaacggcagttacctgaaagcggtcgaggcaatcagcctgggggaagagaacaagttctacctggaacaattcaaaggcatgatgcgcaactcctgggcgcgtaatgtcagaggcatgaaagacatggcagacgtgttggcaagtatcgggcgtgaacggcagaagaactttctttcttattgccagcatctgatacgcgagaacttcatgtaccggttccagtcgccggaactcaattatatgaatacggacgaagctggatttgccgtgaagttcgctcctttcatcaatgaacggaatgtgatcgacatcatggacgagttggcaaaagcggaacggcatgtgacgcaaaatgtgaacgcaaagatggtctttttcgatctttccctacggcttaccgtattgataaaacggtaattccagataagttgtcacagttttttattctgccagtttcctttccagagatagaagaaagcggacaggatcatcaaatcgtagacatgctccgttgtccagcagaccgccacatccgcatgcatccggataccgacccacagtgcatagagaacatagacaaagatacttgccatatcaatcagcaatgccgtctgcgtatttcccgttcccgacacactgaaaaagaagataaaggccggaaccgcaattagataagaggaaagcatcacccaaagggatgatacagaaccggcaatcagatccagattatccgtgtaaatgcgcaataccagttccgggaatagggcaatcagaataccgagcggcaaaacgaagtaatagcaaatccgtatcatacgcccgcacaatcccatcacctgttccggctttccagcaccaatcagattgctgaccagcgaactggaggtcgaagcaaaggcattgacaaacataaacagaaacgaagaaatgcttcgcaccacattcgtaatcgccaacggccgctctccctgatgctccatcacgacaaagaacacgaaccagcctaaaaaagcaatcccgtgctgaatcataatccagatagaaacacccaatatctgcctcaacatccggaaatctatacccgaatactcaaacaacccgtatttcttataatcgactttcttccacgtataaagaatgaagaacagcaccgaaacagcttccgagatcgatgaagcgatcgccgctccggcaatccccaacgccggaaatccgaacttcccgaatatcaggacatagttcagcattacattggctaacaccatcacgaccgaatttatcgtcaggatctttgtctttgtaataccgacataaaaagccctgaacataacggcgacaaaggagaaaaaaaagccatagacacgccagtccacatacttcatcgtagcctggtagacatcatcggaaccgatcagtttgcgcagaaagaaaggcgaatacagatgtgaagccgtaaacaacaacgaggcaagcagcaacaggaaaaacgtcccctgcaggaagaccggcccaatccgtttatattcttgtgcgccgtttcgccgagctatcaatacctgcgcgcctatactgaaaccgaagccaagcatataaatcacaaggtaatagactcccgccaatgccgacgctcccaactcgacttctcctacccgccccaaataggccgtatcggtcaacccgatcatgtgttccatcaatagactcatcaaaacggggaatgttatttgcagaatttgtttgttcgtaaattgcatattgtctgataaaaaaggatgcaaagataataataagaatggattgcacaatataaccgggagacattcgtttttataaaaatgaaccggtatgatggtgcgtataatttattaatgatattcctatgaaagcgaaattattgctgatattctctctgtcattttaccttttcagttgtaacggacagaattcccatatcccggcagctgtcacttcggccgctccagtcaagatcaatcgtttcgacaaggagcttttaaagctggtcgaaacgaacgactcctccatgcaagccaggcttgttcgcgaatacccgcaaatgctcgacatattgggaaaaggtatcctaaacatgaagtctccggcaatgcccggcttcttcgacaaattggccaactactattccgaaccgactttgaaggggttatataccgatgctgtccgtcaatatgacaatgtttcccagatcgagcaagctctcggtaacggtttcacatggttgaagacctgttttccttcgatgcagattccggccatctatatgcacgtttccggcttcaatcaaaatgtactggtcggcgacagcctgttgtccatctcgatagataaatatttaggcgaggaatatccgttataccaggacttcttctatgatttccagcgccggttaatgacgcctgagcatatcgtccccgattaccttgccggttggctgatgtccgagtatccgtttgaaggaaaagaaaatgtactgctcgaccggatgatctatgaaggcaaaataaaatatctgatccatcaagcatttcctgaactgaagccagaagtactcatgggctacacggaaacttcctataactggtgcaaagagaatgaatccaacctgtggaaggctatcatagaacgcaagcatctttatacgccagacctgatgacgacaaataaatacttcgataacgtccccagcatattcctggcaagcgacgctcccggaaatctcggcagttggctcggctggcagattatcgacaaatatatgcgagaaacgaattcgaccccagaagccttgatgcaaaacaacgatagccaagctattctgaccgattcgaaatacaagccataaagcctacgggggatataaaaaaagaaaaccgtcctattctcgcgaactggacggataacctaatctaacttaattctaataccatgaaaaacactatatcttaataacagaaccggtatcgaaaagtttaatagaacggtttatttttatttctttcacaaaataatgatcatgcgagatcaacaacaccgttcctctataactctttatagccgctgttattatttcaacactttgtatatccagattgttcgtcggttcgtctaaaataaatacatccggcgcattatttccgatcataaggcagcaaaagagcaaccggatcttttcacctccactcaagcaaaaacacggcttgtcccatgtctcgtaaggaaacaaacaacggttcaaaatggatttcaattcatgttcagccaaatgcgaggcgttaaaacgttccgtctgctcgaacacggtcaatccgggatcaagcacggaacattcctgatcaatataaagataactgaaatcagcccgtgtaatcgtcccggccgccggtttcagttcccctaacaacaatttgaccagggtcgtttttccgctcccattatttcctgtgatatgaatacggtcgccactcctgacctgaatattcagaggtgacttccataggcaggaagaagtgtaaccgaaattgatctgatccgcagtgatcagaatcttgccggtgtgcagatcggaagaattgaaatttgtctgaagtgcccgcaaatcgggaatcacatcctgaaggctggcaatcgaactttgcagggaagccattttctcctcatggacatcattcagccggactgtacttttctcggctttatctttcagcgtattgactgccatgcgcgagatccctttcttgaaactcgacttatcactgcggacattcgacttattcttccgttccatcacttcacgcgccgttttacgggccaagcgtagttctttctccttctcactcaactgattctgcaaagctgtcaacgccaactctttctgttctttatagaactcataattgccaccataaagtgtgacctcacttttctcaagctcacaaatgcaaggcagcaggtttagcaacgtccggtcatgactgacaatcaacaaggtcgaacgtccgctccggatcatctcatatagcttttcccggccggaaacatccagatgattcgtcggttcatccatcaaaataatttccggtgcatgaacaaggataccagaaaggaacactttcgtcttttctcctccgctcaacgagcacatcggctgggacagttgcagatgctccagattccaagaggcaagtgcggaaagacaacgttcttccacattccagtcgtcattcagacaggtaaagttttctgccgaggcgtcaccttcaagaatggcatgaagtgcctttatccgatcgtccacccgcagggcttccgccaccgtcaggttgtcgaactgtccgaaatgttgcgggacatagtaaggacaggaagaacagatgacctctcccgaagagggtttcaggctcccttcgacaattcgtaacaaagtcgatttaccagagccgttattgccgaccagcgcaaggcgctgtcctgtattgactatcaggtttatgttttgaaaaagaggttctttgtcggcatgaacatagcatagctgatgtacggatatgcacatagttttctttgaattaaaagattataaactaaaaaagataaaatcacaaacgtgccgaaggatggcacaggataaggccggaataaagaatcgacaatcgaaaatgagcaattggcaattacatcagaaagatatttacgatatgtagaaaccggcttacttgaatattttcatcggagtatttatataattcaagaacaaagataatcttttttctaagtattatcacataattcataaaatagatttggccagctgtttcaaagcaccagtgtttattccacaaaacaactatctttctataaatggataatacttcttttcacagccagaagatatcgagttcaaaacatacatgttttgaaacaaggccttttccatttacgaccggaagccaatcagtatggcggaaataaaaaggctgtgtcgcaattcttgacacagcctttttattcccaaacgccacaaaatgttaatcgaacatatgtctaaacttatcgaaaatcttctccttgacagatttcttcggttggaaattaggagaattctccaagccgttcatgatatccttctctgacgcagacaacgtttccggaatataaacacttacgtttacaagcaggtctcccgttccataactgttaacagagggaagccctttgtttcgcaaacggagtactttccccggttgagtccctggctcgattttgactttagccttaccatcgatggtcggaacttcaactgtgccacccaaagccgcttgaggcacactcagtaacaggttatacagaatgtcgttctcgtcacgtatcagttccggatgcggctcttcttcgatcaagatcagcaaatcaccgttaatacctccatgacgggccgcattccccttcccactcatggagagctgcatgccttccgccacaccggccgggatattgatcgtgatcacctcgtcgtcgcgcacgattccttcaccattgcactcgctacatttcttggtgataatcttcccttcgcctccacaggtcggacaggttgtctgtgtctgcatctgtcctaagatcgtattggccacacgggtgacaacaccgctgccatgacaggtttcacaagtcttggaactgtgatcgtcctccgcaccgctgccatgacatttggaacaggtcacatatttcttaaccttgatcttcttttcgactccggtagcaatctctttcaggttcaactttactttcacacgcaaatccgaaccacgatttacccggcgaccgccacgtgaaccgccaccaaaaccgccaaagccaccaaagccaccaaaatgtccgccaaagatgtctccaaactgtgagaaaatatcgtccatagacattcctccgccaaagccaccgccctgcgaagcccctcccactccggcatgaccgaactggtcataacgctggcgtttctgaggatcgctcagtacatcatacgcttcagcagcttccttgaagttctcttcagcctgcttgtcacccggattcttgtcagggtggtactgaatcgcctttttacggtaagctttctttatttcctctaccgaggcagtcttctcgacgcccagcacttcataataatctcttttagccatcttcgtatctgtctgttgttatttgctcattatcctgtcgtattattcgcctaccacaactttagcgtggcgaatcaccttatcgttcaaagtataaccggtctgcacacaatccagaaccttgcccttcatatcgggttctggtgcaggaatcatggcgactgcttcagacgtttcagcatcgaacggttcaccgacagtttcgatcggttttacattctgatgagacaggtaagacatgaatttcgaatagataagttccactccttccgtaacagcctttatatcttcagcagaacggatattctgcaaagcacgttcgaaatcgtcgacaacagggagcaggtgagtcaaagcactttcgccaccgttcttgatcagctcggacttttcgcgcaatgtacgtttacggtagttatcgaactcagccatcaagcgcaggtgggaatcattcagttcgtcatatttcttcttcaattcttccagctccttctgctccggaccttcatccgtcacattgtcagatgtggcattttcttctgccgcatttacctgttcatcctgcaattttgtcgcgtcatcagcaccctggcgttcttttttgtcagcagtttccttcttgctattaaaattcatcttgttcataatcaattatatattttcattactatctaattgtcagtaagatatcatacctatatcggtcatacgatctgcctgtcggcattattcttgtcgatatcaatcaccaatataacatcaaatatactgccaactgttcttatagaacgaaaatatctttacctttgtgtagtaaaagatgatttattatcatagtacaaataataagattaataaaacaattaagaaattaattatgaagagagcgattttgtcagttttactgctatttgcatttcttaccggttttgcccaaaaccggaatatatgccgattaggaattacatacgatatcagtcaaagcgaccactgggggaaaaacaaaccgatcataaccagtgtcatcccttattcgccggcagaactcgcaggagttaaaaccaatgatatcattatagctatcgacggtgtgcaaacgacagatatttcgtcggaagagatcggtgaaatgctgaatcccgccgggaaaaacgaggtattactgacgatcggcaatctggcgaaccctgctaaacaggtgcttgtcaaaaaagaatgcaaaaaagggaatgcgattaccgaagaacaattggccaccgctttttctatgtacagcctcgaaacgaccagcgaacgggaatttgtctgtccattcaagacaaccgtgacagccgaccctgtagatttaggaaagttcaagacttttgccttctctgccatagacgagaataacagcaaactggaaacggctatcaacgaaagcatcgaaaaggagttgaccaagaaaggaatgacagtcgacacagaccgtcccgacatcatagtacagaccttctatttcttcgataagaatccgaactataaaggagcgaacaagatcctggtcgaaaaagagccgatctatcgctacaacttcaatcacagcaagatggagacattcccgttcctgaactcgatgtctgcagaagcggaagcggaatacctgctccagttcggtttccgcctgatcgaccaacgtgacgtaccgggccgcatcctgtgggaatgcgaagcaaatgagctgttggaagactcataccgcctggatgaatatgcccgtatccatgcaccattgatgtgcatgcaatatccgtacgtcaaatatcagcgtaacgtgccgttcaaggtcaatcagaaaacctacaactacacggggctgagttacgatatcgaccgtatggaacagatcgccgatgtcgacaaaaactcacctgcctatgcagccggattacgcccccgtgatattgtagagaaaatcaacgaccagaaaatgaattacacggcagaagaattctccgctgcttacaaaggatttattactaacacgatgaaataccgcgatccgaaaacccagtttacggatgccaacggtttcaaacgttgtatgttctgggacacattcaaatacccacaagtagccgatgcgatccagaaacccggtaacaagaccgcctactcatatttatattattacgccccgtatatcaacccatccggaaacaatgcctgtacgttcgatatcaaaaggggtaaaaacaaaatggaaatcatcgtccgcccgaccattcgccggtccgtgacggtcgaagtaaaataaagcatttacaagaaagtgatatatccgcaaaatttcgaacaaaaaacgggcttcgataaagtccgtcgtttaatttcagagaaatgtttaagcccgctcggagaagaacgggtggcagagatggaattctctgccgattatcaaaccgtaactcgacgtctggaacaaactgacgagtttgttcgtatcctgcacggagaagacgagtttcccgccagttatttttttgatgtgcgttattcgttgaagcggatacgccccgaaggaacctggctagatgaaaaagagctattcgacctgaaacgttcgctccagacaatcaacgatattatccgcttctttcgcccttccctggaagagggagaagagatcaaatacccggcattgaccgcccttgccggcgatattcaggtattcccgcagttaatcggaaagatcgacgcgatactcgacaaattcggacgggtgaaggacaatgcctcttcttcactggcgcagatacgaaaagagatcacggctaccatgagcggtatctcccgcagcttgcagtcgatattacgcgctgcacaatcggaaggtgtaatagataaagatattactcccaccatgcgcgatgggcgcctgatgatcccggtcgctccggctttcaaacggaagatcaaagggatcgtgcacgatgaatcggctagcggcaagactgttttcatcgagccggaagtcgtcgtggaggcaaataaccgcatccgcgagctggaaggcgacgaacgcagggagatcatgaagatcctgacggaatttacaaatttcatccgtccgttaatccccgatatcctgcaatcctatgagttcttggccgagattgacttcatccgcgccaaagcattgtttgccgagcagataaacggaatcaagccggtcatcgaggacaaacagcagatcgactggatacacgctgcgcatcccctgcttttcctctcgttacagaaacaaaacaagcagattgtcccgttggatattctcctggaagagaaaaaacgcctgctgattatctccgggccgaacgcaggtggtaaatccgtttgcctgaaaacggtcggattgctgcaatatatgttgcaatgcggcctgttgatccccgtatatgaaagctcgaaaacgggattgttcgaaaacctgttcattgacatcggagatgagcaaagtattgaaaacgacttgagtacctacagttcacacttgacgaacatgaaatttttcgtcaagaactgtaacagcaaaactctaatcttgattgacgagttcggtagtggtacggagccccagatcggaggtgcgattgccgaagccctgttggaccgtttcaaccggaatcacagctacggcgttatcacaactcactaccagaacttgaagcatttcgctgaagacacggaagggatcgttaacggcgccatgctctatgaccgccacctgatgcaaccgctctttaagctgtcgatcggtaatccaggaagttcttttgccatcgagatcgcccggaagatcggcctgccggaagatgtcattgcggatgcatctgctaatgtcggctccgactatatcaatatggataaatatctacaggatatcgttcgtgacaaacgctattgggaaagcaagcgacagaatatccgccaacaagaaaagaagctggaagatattaccgcccgctacgagcaggatttggaagccgtaaacaaacaacggaaagagatcatgcgtaacgccaaggaagaggcacagcgtatcctttccgaagccaacgcaaagatcgaaaacacgatccgcgaaatcaaagaggcacaggcggaaaaggaacagaccaagcttgcccgcaaagccttggaagaattcaaggcttctgtgatagcagccgaagaagaggacgacaagatcgcccgcaaaatggcaaaattacaggaacgcaaagaacgtaaaaagcagaaacaaaacgcgccggcctccaagcaggtcttcaaccgtgatatcatagaagctggcgacaacgtccgcctcaaaggacaagtctcagccggaaccgttatggaagttcaaggaaagcaggcagttgtagcattcggcatgatcaagagcacagtcaagttggaacaactggagaaggtcagtaaaggacaaatcaagaaagagatccaaaaaagtacttttgtcagtgtccagacagcggacgatatgcatgaaaagaaattgaacttcaagcaggagatagatgttagaggtatgagaggggacgaagccttacaggccgttacttactttgtggacgatgccatacaggttggtgccactcgcatccgtatcctgcacgggacagggacaggcatacttcggcagctgatacgcgattacctacacactgttccgggcgtccgccagtatcacgacgaacatgtccaattcggaggtgcgggtattacggttgtagaactcgaataagaacaaacagatatgaggcgaagagaatatgtacatccacacaagcgcaagcatatttccaaccgacatcttgccgaccgatatttctatgccggcgagcatgataccgttacccggatcagcctcacacagtacaatgctgacactctgcacacacgggagatcaagacaaacgaaacgtcgttcaaaaaatttgtcgacggaaatagtatcaactggttccaggttagcggtctgactgattcggaggcggtcacgcgtatcgtcaatgaattcgggatgcataacctggacgccaaagatattctgactccccaacacgtagtcaagatagaagagtatgacaaacacatgcttatcgtactcaattcttcctactacgacaccaatatggagatcaactccgaacatatcagcatcctaatcacgggaaacgtagtcatcagcttcacggaaagcaacaatcctgtattcgaaaatgcctacaaagccatcgaatccgacatgctgaatattcgccgaaaaaacagcggactactcctggcattccttttaaatacgatcattgccaatttagtggaatcggcctccaaagtggaggaaatgcttgaggatatagaagagaccctgctcgatatcaaaaacgaccaaggtaatatggggctgcttatccaacaacgtcggaaagaatatatggttatccgcaagaacagccaaccactgaaagagcaatttgccaaactgctgcgcaccgaaaacggaatcataagctccgacatccttcccatctataacgacttatccgaccagttgcagttcatcatccagacaaccgaaagctgccgggaaatcatatcttccctggtcgatctctacatatccaataacgacctgcgcatgaatgcgatcatgaaacgcctgacaatcgtatccacgatcttcatcccgctgacattcctggctggtatatgggggatgaacttcaagatgatgccagaattggactggcaatacgggtatggtatagcctggtcactcatgctactgacagcaatctcgacctggctatacatgcggaaaaaggattggttttagagtccgtagttccgtttgaacatataataggtatttctggaaacattaaaacgtttacaaatttcgaaaacagtgtctccgcgttcaagcatgctgatcacctcttctttattcgcatccaggaaagactgttttgcagccgatcctttcggacggcctaacgggcctcccgcgctcttcttatgattcaatgcctctttggtacggattgacatcaaactgtgttcgatctccgtcaccaacttgaacacgtttcccataactggcaaatccaatgcctggtctaggatataccggtctcttatactatagatctgaacgcctttttccatgcagcgtcccataatatccataacttccgacaaagttcgtcccaaacgggaaatatccgaaaagatcagactatcgcctttttgcatacgatccagtaccctagcgagattacgttcatcttccctccctttgtcgacagtgacatccgtaatccacttatcgacattcatatcatgattcgaagcataacgttcaatctcatctttctgttcttctagaagttccttgtttgaagttcctactcttaaataagctattaccatatttccagcaacttaataattaaaaaaacgtagaaccaaaatttatttctcggtgaagatacgaaaagtaattatagcacaatagctaaactttccattttatttaaagaaaatgttagtattccgttctttaacacaataaattaaatcgtatgtaaaaagctatcgaactaagaatgaaatagctaacaaattatccaataaccggggatttattacctttccctcgatataagtattttgaacatgtttatcgttttttttgatcttagtgctggtagtcgtatggggcatctcgacttctccatttaactggcacggagggatcattccccgcaatccgattccggtagacgcgattcccgacatcggcgataatcaacagatcgtagcgaccgaatggatgggacgttcgcccaaagatatccaggatcagatcacctatccgctaaccacttccctattggggattcccggagtcaaatcgatccgtagctcttccatgttcggcatgtccttcatctatattatttttgatgataatatagaattctactggagccgttcgcggattctcgaaaagctcaactcccttccccccggcacgctgcccgaaggcgtacaaccggcgttggatccggatgcaaccgctttaggacaaatctactggtacacgttggaaggacgcgatccggcaaccggaaaaccgacaggcggatggaatgcggaagagctgcgtaccatacaggactactatatcaaatacagcctttcggccgccgaaggcgtgtcggaagtagcatcagccggaggttttgtaaaagagtaccaggtcgagctgaatccggatgccatgcgcgcctttaatgtttccgttatggatattatgggggcgatcaagaaaagcaatctcgatatcggcgccgagacaatggagatcaataaggtcgaatatctgatccgtggcctgggctacatcaaagatgtatccgacctggaaaaagccgtcgtgacggttcgtgacggtgtgccggtacgcatctccgatgtagcgtttgtaaatatcggtccgggtacgcggcgcggcgggttggataaagaaggtgtcgaagcagtcggcggtgtcgtgatcgcccggtatggttccaatcctttggaaggaaggtgtgtcgtaatacccgatgcgccttcttttttttcgttgactataaaaatcggctcatttttttaagctgcgacattttgaggatttcttcgatttatgtgttcccagcatctaaatatagctactgtaagctcataaaacagtccagtcagccaatccataccttctttagccatttttgcacatatcttttttatattgaaggcaatggcaaagaaggaaaagtccatgaagaccttatcctttccaaaatggcggaaacgtttgtaattcatattgtttttcatttgtccgaacacggcttccggttctatgcatctctgtcctctgtgtttcagcccttcctcggagcagagcagctctttggctttttgcctgtattttctgagcctgtgattcagttctatcgtcctgtttccttttgctttaaaacaacggcatcttagcggacagccttcacatctgacggctctgtacctggcattttcgctgacatatccggatgcggttttcacatgtctggtacctatcctccgcatcctttgtcccatagggcagatgcaaaagtcatgttcttcattgtagtagaagttttctgccttgaacggatccggttggaagctcggccgctgctccatgtggaaatagttatatttgacgtaagcttccatgccgttctctgacatgaagcggtaattctcctcagaaccatagccggaatcggcaaccaccgtatgagccatccggtcatacctgtttgaaaaagattgcaggaaagggatcatggtcagtgtatccgtagggttcgggaagagtgcaaaatcggtgatgaactggttctcggtgccgatctgaaggttgtaaccgggcttcgtctgcccgttacgcatggcatcctccttcattctcatgaaagttgcgtccttgtccgtcttggaataggaattcctctcttgcagcgtgtccagatgactgtcgtattcctggagtttgtccctatgttcttccagctccttcagctgtttgcgtctctttttcagctcagtcttttcctccttggtggaaggctcgggaacctgttccagcacatgacgtaattctcccgccatttcggtcagcatggccggagtgaactcaacctcctcattactttccgaatacttttcttgggcgatgacatcgtctatctgccctagcaggacatgtatcttcttcatcaggcgctctcggttccgctcaaccgtttttcgccaaacgaaagtatacttgttggctttggattcaatctttgtcccgtcaatgtattccacgttcaaactgataaatcctttggaagagagaaggagtacggtttgggtaaacacctcgttgatttccttcttcacccgattgcggaaacggttgatggtaatgaaatccggtttctcatatccggcaagccagatataatgaatgtcacgatgaaggagcttttcgattttccggcaggagtagacgttgttcatgtaggcatacagaatgaccttgagcatcatcttgggatggtaagagctgcggccgcattccttatatagcttcctgaaactttcaagattcaggccctcaaccagggcgtcaaccatgcgcaccggatcgttatctgcaatatcctcatctattctttgaggaaaaagcactgtttggttgggattgtaaggacgaaaatgtatctttgccatagtataaattcttatgcctaaagatacaaaatcttcaggttataacaaagccccagcttgtgaaagtcggggctttgggcataaaaaagaaggtgagaattttgacacaccttcaatcctttggaagtcattaataatgtaaaagacaaaatcaaggagatggcgtccggacttccccagaaaaccttacccgacgggactgtctccaaaatcaccgtcgtacctttttacgaccggacaggcttgatcaaagagacaatcggcacgctcgaaacatctttatcccacgaaatactgatctgtatcatcgttatcatcgtgctggtcctcaacctccgggcatccgtcgtgatagccagcatgctccctatcgccgtgttgtctaccttcatcatcatgcgctacacaggaatagccgccaatattgttgccctttcgggtatcgccatcgctatcggcgtgatggtggacgtcggcgtcgtgtttgtcgaaagcatcatccggtatatggagatgccggaaaacagaggcatccgcaaagggaaagcgatggtaaaccttatttataaggcggtcagtgaagtatcgggggccattgccacggcgatgatcacgactatcgtcagtttcctgcccgtttttgcaatggaggcacaggaaggaaaaatgttctctcccctcgcctacacgaaaacctatgcgctggcctctgctttcgtattgggattgatcttgctgccgaccttatcctatatattgttttcggtacggatcgactcaaagcggatacggaaagtgctcaactacatactgattgcagcaggtgtcctcttgtctgtcctgtacagtaatattccggcactcggacttacagccgtcggacttaacaacctgcttgctcactgttggaagaaacccggaataagtaactatatcaatatcggtatcgcacttgtcgtcgccacctacttcttggcagaagaatggttgccgatgggcccccagaaaggcattatcgtcaatcttcttttcgtaacaggatgtatcgccatcattcttgcactgctctggttactggtgatctactacgaacgtatccttcgctggtgtctgaataaccggtggaagttcatgctgctaccgatcgcgactatcctatgcggcatcctgatctggaaacggatcgggcaagagttcatgcccagcctcaacgaaggttcattcctgttgatgccgaccagcatgccccatacaggaatcgagcaaaacctgaattatatcgaagcgctggacaaacgcctggcagccatccccgaagtggaaacggcaatcggcaaatggggacgggtaaactcggcactcgatccggctcccgcccagatgttcgagaatacgatcaactatcgtcccgaatatatcctgaacgaagacggaaagcgggaacgtttcaaagtgaaccggaaaggagaatatctcctgagaaacggaggcacttacaatccggcagacggcttccgcctgattccggcagatagcctgataccggaccgcaaaggagactatttccggcaatggcgtcccgaaatcaagaacaccgacgatatctggcagcaaattgtcaacgtcacccacctgcccggactcacatccgccccgaaactgcaaccgatagaggcacgccttgtcatgctctcgaccggtatgcgcgctccgatgggattgaagatatacgggccggatctggaaacgatcgagcagagcggaaaggcgatcgaacaggcgctcaaagacgttccttccgtgatcccttcgtccgtattctatgaccgggcggtcggagcaccttatctggagattaagctgaaccgggataacatggcccggtacggagtgaacgtcgaagatttacaggagatactaagtgcagccgtcggcggcatgatcctgacgaagacggtcgaaggccgcgagcgtttccccgtgcgcctccgctatgcccgcgaactgcgtgataatccggaagcattgtccatgctcctggttccgacagccaccggcgcccagatcccattgaaagaactcgccgatatcgaatatgcccgaggcgcccagatgatccagagtgagaacaccttcctggtcggctacgtgatcttcgacaagaaacagggaaaagcggaagtggatgttgtaaaagaagcgacaaaagtgatcgaaggaaagatacaaaacggagagttgaaactaacaaaaggcgtttcctacaagtttgccggaaactacgaacaacaggaacgtgccaccgcccggctgatgatcgtcgttcccctggccctgctgatcgtcctcctggttctgtatttccagttcaagacccttacagcttcgttgattcatttctccggtgtattcgtagctttcgccggcggctttatcctgctctggctgtacggtcaggactggttcatgaacttttcgctggcgggagtcaatatgcgggacctgttccagatgcataccattaacctgagcgtagccgtatgggtcggcttcatcgcccttttcggagtggcgacagacgacggtgtgctgatgggaacttacatccatcacgtcttcctggaaaaggacccgcagaccaggcacgccatacgtgaagccgtcgtgacagcaggactcaaacgtgtacgtcccgcagccatgacaaccgcgaccaccctgatcgccctgctccccgtcctcacctcgaccggaaagggagccgatattatggttccgatggcaatcccgactttcggcggcatgctgatccagtcgatgaccatgtttgtcgtccccgtattccaatgctggtggcgggaagggctgctgaagaaagaggaaaaggcccgcaacgcagcagaaaattcctcaccgggaaaataaattttcctcagcatgaaaataaattttcttcggatgaaaaaaaattttccattgcatgaaaataaattttcacgctgagaaaaaagttgaaactttcttatataaataaagtattagtagaatgagaataaaaaagcatatagccatcttacgttgggccgccatcctgctatcggcactttggtatctcccatcacaggcacaaacgaccgacagcctttcctattacctggaaacggccgcccggaacaatccgtcggtaaattccagctttgccctttacaaagcatccctggaaaagataccgcaggcgggagctttctccgatcccgaactcgaaatgggcttcttcttcaaaccgatggagcagctatccggcaaacaggtagccgacttcaccctgatgcagatgttcccctggttcggaacccgcaaagcagcccgcaacgaagcgaccgaaatggcacgcatggcttacgaacaattcagggaaacccgcaacaacctgttctacgaagtcaaaagccagtggtatcaactgaacaatctgaatgagcagtataagaacacggcagcgaacctcgaactgttaaagcagttggagcagttggcgctgagccgttatacagcttcgtccgttccgggcaggccgacaccttccgttgcgcctccggtcacctctcccgttccccagacaccggcaaacaacagtatgggcggtatggaaaacatggggacctctccttccacgacctctgcgacaccgggcggaaatacaacgatgtcgggtatgggcgattcgatggcaggtggttcgatggggagcggttcatccggcagcatgtccgacgtacttcgcatccagatcgaaatggccgaactggaaaacaacctcgaagctctccgatcgaacaggaaagcagccgaagcccggttcaacagcctgctgaaccgggaccaggatctgccggtacaaacttccgattcgctggcacaaaaactgttttccatagaagacaatgcggtcctggacagcatcatcctctccaacccgatgctctccatgctcgaagcggaggcaaacgcgtataaggcaaaagcggagatggacaagaagatgagccttcccatgttcggcatcggactgcaatattccatcatggctaagaattcagaagagatggcccggatgtcagggatgagcaatatgaacggcatggatatggtcatgccgatgattaagatcagcatcccgatcttccgccggaaatataacgcccagcaacgggaaagccggcattaccgtgaggcaagcgaactgaagtacgaagacacgctcaaccagctacatgccgaatatatcgccttaaagcaacaactggccgatgcctcgcgcaaaatagacctgtacgccaaacagcaagacttgtcccggtcgacctaccagttgatgatccgcgaattttcggcagggacgacttccctcacggacatcatccaactggaacgccagttactggattacagccttaaaaagagcgaagcggttgccggatacaacacgctgatcgcgagtttagagaaattagtatcaacctccgtaaatgaataacaagatgaaaaagataaatgaaataataaaaagcaaaccggttcaatatataatagtagcctgtgccggcttattagtcggctggttgttgttcagctcgtctgaaagccccgctccggctacccatgaggggcatgagatgcacgaaggacacagtcacgacctcgtacaggacgagacgggcgtctggacctgctccatgcacccccagatacgccaggataaacccggcaaatgcccgatctgcgcgatggacttgatcccggtccgtaaaggaagcggcggcggagagaactccgacccgaaagcaatccagttatcggaagaggcggccgccctggcagacgtgcagacttcaaaggtcagcaggaaaaacccggtcaagacagtccgcctgtatggcaagatcgccccgaacgaacaaagcttacagtcacagacagcgcatgtaggcggacgtatcgaacaactcaacatcaattttaccggtgagagcgtacgagccggacaaacacttgccgtcctttattcacccgaactgttcaccgcccagcaggaactgttggaagccatcaagatgaagcagcccgccctgatccaggcagcccgcgagaaactccgtctctggaaaatgacgaacgcccagatagaagcgatcgaacagtccggtagcgtttccccactcgtcgagatcaaagcgaacgtaagcggaatcgtcatgaccaaacgcgtaaaccagggcgattatgtcgcctccggagctgtcctgttcgacatagcgaacctgtcgaggtatgggcgatgttcgacactttcgaagttgacctgcctttcctgaacagaggcgaccaggttcatttcaccttgcaggctcttcccggcaagacctatacgggccggatcgcgtttatcgatccgatcatcaacccgtccacccgtacggcacgtgtccgggtagaagtccccaacagccatatggaactgaagccggagatgtatgcgaccgccgaggtcagcgccccgcttcaaggatataaagaccggatcaccgtgccgcaaactgctgttctctggaccggcaaacgttccatcgtttatgtcaagcaaccggacacctccactccgaccttcctgatgcgtgaagtagaacttggtccttccctcggcaacgcatacgtgatattaaaaggattatccgaaggagaagaagtcgtaacgaacggtgttttctcgatagatgccagtgcccaactggaagggaaacagtcgatgatgaacaatgacggcgaagcacaaccgatgagcggccatgtagggcatacgatgagcggtcacgaagggcatgccgcgcacggtacatccgcagcacaaccggaaccggcaggcgagcatgccatgttcggggtaaaaggttcctgcgacatgtgtaaacaacgcatcgaaacagcagccaaaagtgtaaacggcgtttcgtcggttcattgggataaggaaaaacagatgatacatctacaatacaatccgtccaaaacatctgtggacgctattagcaaagctattgccaaagcggggcacgacacagatacttataaagcggatcaaacgtctacgaccaactgccgggttgttgcaaataccggcaataagcggatactacaacccggacaagcgaccagcccgtcatcgccactattatcattttttatattggtggcgatattcggtcgcgcttagtccggctgcgttcttaaagaaacggctgaacgcagcctggtcttcgaatcctagcatcaaagcgatctctttagagcttttagccgtataaagcagtaaacgccgggcttctgcctgaatgcggttatggatgatacggatggcggaaggctgctgataggcggaaaggatatttgccagtgtcttcggggatttgttcagcatgtccgcatattcctgcacctgttttttctccttaaaataggtatcgaccaggacatagaatttgcggatcgtctcgaactggaggctgttctcccgaacagctccctgccgatcttccgctattcgcgtacataatatgataaaccgtttcaacaatacccggagcatctcgtcttgcaggtgatcggtactgagaaactcctcttgcatgatcctcgtcagcgtgtcgatcttccgccgttcatcttccgaaaggacaaaagtcagcacatgcgatgaaccgtgaaacagcaacccgttgcacgagacctcatgatcgttgccatgtatacagtagaaattgccgttgaacatcaaagcatagcatttgccttcgatgcgcagaaactccaaatgatgcaaatgggaaagcggaacgagctgttccttcttcaaaacaacatgctgatgatcgatatccaactccacttcgccggaatccacccatataaatttatacagcgttttgtctttcagaagatccgggtcttcatggagcgaatcggtcaagacgatccgcccctttattttcgcattctcaaatgtccatttcatggtatcttaattttcaattttcaaattccactacctccagttccctggcaactctcccgtatgccgcctgaaccaacgcgcaaaggtatcataattagagaaattaagcatcatagcaatgcgggaagatctcagtcgagttttaatcagtaagtctttcgcctcaagcaatacatactggctgatccattccgcagccgaaataccggaatgcaatttacatttgttattcagttccgccgaagtcattcccaacttctcggcaaaataataaaccggataatgatgataacgcctaatcagcaaagcgaaatcgtggaagaaaggcggaacctcgctatcccggtcgtccgccagatgcccttcctgctggaggaagaaaataagggcgcgcaaaagcgattccaccactttgacacggacatcgctcattcgctcgatttgtgactgcatcagctggatataaagcccggactccttcagttcgtccggtgtaatcgtccggaacatcagacgttgccgattgatcagcagatcgctaccggcatagatcacgatcccttcaaaacctgtctccgaaaaacgggatatctcactcacatcttccacagacgccaggaacacctgtccggcaactatggagatttcctttccaagtgctttgcattcgaactttcctccccggcagatcacagcaagagttcccggttccaaaggcaacagttcatgatcctgcccagcttcgacgtgaatgacctttaaagcactttccaatgtcaaatttgcaatcgacacggcatgatagaggtcgatcggtaatattttatcagcattcatttccttctcacttttaaataaaaaccatttcacttcgaacatttaaagatagatgttagtttaatatacactatcatttttatatttagttaaattgctattaatagcatttatagggtttatcacgcaataaacaaaatcgattgtttttattaaagataaaacattcagccatttttattagttttatatttgcacatcaaaaaagaaaaagatgaagataccgtttaaaccaattgaaatcgaagatagagatattataacatcctttacgataccgagcaattataaaaattgcgattattcatttgccaacatctgcagttggcggtttctctacgatagcgagttcgccattgtcaacggcagcttgctgatccgtttctggatcgaaaacaaaacgagagtcgcttatatgactcctacaggtcaaggcgacctgaaacaggccatcgatctgttagaagccgattcgctcgaacagggtcatccgctctgtatgttaggcgtaacgccagatgccaaagaagaactcgaaaaggcaattcccggcggatttttctacatccccgaacggaattatttcgattacatctacttgcgtgaagacctggcaaccctaaaagggaaaaaataccaggcaaaacgcaatcatatcaacaaattcaataagaagtttgcctacgaatatattcctatcacaccagaactggttcccgaatgccttcagctcgaatgtaaatggtacaaagccaaccgggaagataatgacgaggaggatctgaacgacgaacgccgttctataatctacgccttgaaccattatgacgaattgggacttattggaggagccatttgcgtagaccatcagattgtcgctttcacttttggtgccccgatcaaccataatactttcggcgtccacgtagaaaaggcaaatgtgaactatgagggggcttatgctgttatcaacaaagaattcgcctctcaccttccggaaaaatacacctatgtgaaccgagaggaagacttgggtattcccggtctgcgccaggctaaactttcgtataacccgttcatcctattggaaaaatccgcggcaataaagaaacctgcaaaataatattgaacgatggataacaacaaatctcaattgatcgacctgtggcgtacttctttcaacgacagcgaagaatttatcaaactattcttcgatcgggtttacaaaaaagaaaacgccctgtttatagagaaaaacggaaaaatcgtttccgcccttcaaatgcttccgtatgtcatgacttactacggaaaggagatatccgtaaactatatatatggagcctgcactcttccctccgaacgaggtcagggacttatgcgccaactgatacagaaagcattcgaagtgatggaaagccggaaagtggccttaacagtcattatcccggccgatccatggctgttcgactattaccgcgatttaggatatacggaagctttcgactattcagaagaaacgtatatctgcccttctgaaatagcactggaacagggtgttttggttgtaccgcccgaagtaccttcgatggagtctctctacaatttttttaataagaagcagagagaacgtatttgctatgtgctgcacggttatgacgatttcgttactatcctgcgcgaattacagatgtccggaggacaaatgctgaccgccttaaacattcaagaagaaccgatcggaatgatctttttctatcctgtcggcgactatatctatgtcaaagaattgatgtatgacaacgacaacatcaagaacctgctcttacaggaagctacaacacagagcaaggtggaaaaggccgtctgccgtactcctttcaccggaccgggaactttccctttaggcatggcacgtgtcttggaccgcgaccgcctcatccatcactgggccttcacccacgcaaactccgttcttaacatcggcgaactaaaaaagatggacacccaatcgctcacccgcttgttgctcaactatcagagccgggaagcttatatgagtttgatgcttgattagcgttcattttacccaaaaacaaaagctcagcaccactccgacaggttacggagatccgaaggaacgattatccgattaattcgtatttttgcagattcatacaaaactatacgaataaaaagagctgacaatgttacggaaaggagaccttacacaaggaggtataatcaccaccctgctacaattcacattgccgatgctggcaggatcgcttttacaacaatgctataacatagccgatacactgatcgtaggacaatgtatcggtgcaaatgcgttggcagcagtcggttccgcctataccttgatggttttcctgatctctatcctgctggggttatcgatgggaagcggcacggttttctcactgcaatacggagccggagacctgtccgccctgcgacgtagcatctacgtttctctcctgctgatcggcacggtaaccatcttgctgaatgttgccgtgttcctatggctcgatccgattttacgatggttacaagttccctgtgatatttattcgttgatgcgtaactatctgtggatcattttctggggaatagtcttcactttcctgtataatttttatgcagcgttgcttcgggctgtaggcgattctgtaacacctttatggtttctggctgtatcggtcgttttgaatatcgggcttgatttgtttcttattcttgtcctggatcaaggcatcgaaggagcggcagtcgcaacggtcatcgcacagggaacggcggcatccggtatcttgctgtatacctataaaacccgccccgagctacgattacaccgggaagatatgtgcttcgaccgttccagcctgagagaaatcacttctttctccacactgacttgcgtccaacaatccgtgatgaacttcggaatattgatggtgcaagggttggtaaatagttttggtacggttgtcatggccgcattcgccgcagcagtcaagatcgactctttcgcctatatgcccgttcaggagttcgggaatgctttttccaccttcgtcgcccagaattttggggcgcgaaaaggggatcgtatccgccggggagtacgcagcgcatttcttataacgatcgtcttttctcttgtcatctcgctgttggttttcttttttgccaagccgttgatgcttattttcgtccgtccggatgaggctgagatacttcgcatcggaacagaatacctgcgtatcgaaggagctttttatttaggcatcggaatcttgttcctcctttatggttattaccgggccatccgtatgccgggaatgtctgtcgtgcttaccattctgtctttaggtacacgtatcgtcctttcttattggctggcatccattcccactattggggtcaccggtatttggtggtctattcctatcggttggtttctagcagacttagccggcattgcctattaccgttatcgcaaatatgcagtctcacggacttgacaaaaatccgcctccgatatacatttattaccggatttttctatctttgcagccgtaaaaagtaatgataaattatggacgacagtattccgcgagaaataaaaacagtaagtaacaaataacgcgcaggggtaaacagcaaggcctctgtacgttgacaaaaacgaaaggaggcaataatgagaacttttctttattgtgaagccggctttgtggaaaaagaccaatggcttccaaacagctggatcaatgtagaatgccctacaccggaggatatccattacctgacaaaccaattcaatgttcccgaatcttttttaagcgacattgccgatacggacgaacgcccgcgtatcgaatatgaaggaaattggttattgactatcattcgaattccggtacaaagccaggaacaaggaatccctttcacgactatccccctggggattatgacgaacaatgaaatcatcatatccgtttgctattataagacggaactgataccggactttatccgatacacccgccgcaaagaggttgtcgtacgtcacaaatatgacctgattctgcgtctgatccattcgtccgccgtatggttcctgaaatacctgaaacaaatcaacaacgaggtggcgcatgccgaaaaggcactggaaaaaagtatccgtaatgaagacttgcttcgtctgatgaagctggaaaagagcatggtttacttcaacacatccatccgtggtaatgaagtgatgcttaccaaactgcaaagcatcttccaagaaccggtctatatggacaacgaactggtggaagatgtggaaacagaattaaaacaggcgcacctcacggtcaatatctatagcgatatcctgaccggtacgatggacgcattcgcctccatcatttccaacaacgtgaacaccatcatgaagcgcatgacctctatctccataatcctgatggttcccaccctcatcgccagcttctacggtatgaacgtcccgatctacggagaaaatatgccgcatggctttgccatcatcgtcatgatctccatcacactatcagctttatcatttttcattttcagaaagatcaaatggttctaaattaaaaaatccgctttaccttcacaggcgaagcggatttaaaatcgataagctttttctaatcaaatatctaatcagaaaacaatatctcaggaaggataatatctaattctgacaaataaatagcaaaggacgtgccagaaatagaaataaagatatattttaaaacaaaccactgatatacaaaccaataaaaataatacatataatacaaaagaaattggggaagtgtggagtagattggggaaagtgtgtaaaaattccacaattaagtgtggaatcccgacttttgagcgtggaaagagcaataataatcgactgcctttttcagcaaatcttccgggagatcgaaagattcatcgaacaaagaagtttcgacagcaagagctttcttcttcgaatcttttttccaattgccaacgatccggccctcatacaggatcacggggtaaaagataccgaaagtattgaatgccttaggatgatgttcgtgtagcataacggtcgtccggtctttatagctgatcagatattcatcatacgagggtaacagatgcaacactttccggcaacgggccttcaagtcacaggtaacatgcaggtaaaaagtttccgaatcaaacttttcggttagcagatcggtttcgatcaatgcaaccgcatgtcgagcctcagttgccgtcaagccggaccaccagacaaaatcagacaatgtagccggggaatggctttgaaaatatagggtagccaatcgggcgagcgcctcttcgcggctgagttctttcatcggaggcacacgttcttccaacagagcataggtcggctttttgtttttatctaccccgctgcacacaaggccatccgtttcagcacggaccagaaaataatgtatcaagtgattgtctgtctcgactcctgcccgaccgaacccatccatcaactcctgttttgtcaaactcttgtttccacccaacaattgttccagcaatctacaacctttcgtatagaagctttcggttatctccatcttccggcttcttgcataagaatcgaaggctgtccgtatacgacctcccgacaattgcagcatccagcgaatatcctctgctgcgatgaaatgccaggtcggtcgtaatatatgggtacgcaggatttccccctttgcaagcgcatcgtccaccacccgcaacgaagaagacttcaagcgagtcccgaccgcccatttcgccatcgtatattcctgtgcctggacagctcccatccaggcaaccaattccttcggactcctgaaccggggctttgccaattgatggctcaacagacgaatatcggtcaacatattcttactgttagcaggattttccggtcataatatccaataccagcttatcggtggcttccattcctttggaaccgatagaagtcaggttaatgatcgacttgtcgacattctcatcaataatgccctcgaccggagtcaccaccttgttttccattgccatcaacgcagacaacatagcagtcgaaacaccgctggaaactttcatggcacaactgggcttcgccccatcacatatcataccggtaatattgccgatcatattcttgattgcataggaaatctgcactttatcgcctcccatcagataggtaatgccgcaactggctcccgtggcggccaccacacaaccgcaaagggcggacaagcgccccaggctttgcttgatatagatgaccatcagatggcttaacatcagggcacggattaactgttcttccgaacattcgatgtcttcggcaaaagaaaggacgggaagtgtcgctgcaatcccctggtttccactaccggagttactcatcaccgggatcatggcgccatccatgcgggcgtcgcaggcggcagccgtcattgccagcatatgggtataggcagagtcgcccatatatttacgtccgtatacaccggaaacggtcttgctgaccgtatgtccgaaatttcccttcagggaagcctcggctgctttccggttcagatcggcagtttccagaataaagcggatctcatcgagcggcatttccatcgcaaactcatacacagtagagaaagagagtctcaattcgtcttcatcgcccgaagcatcacaggaaacaccttctttcctccggtctgtcaataccacaccattcttctccacatacacgacattcgtatgttcatggcagattatcacccgcgaagtttcatctccggctgaacaaatcacttcgatatagagcttgtcgacattatcctttaaagcgatatgaattcgtttatcttcgatcacctgctttccttcagcaagcgcttcaggtgtcaggtcacgcaatacttcgaggccataagcagacttgccgatcaacgtacccaaagcaatcgctataggcaacccgaccattccggttccaggaattccgacacccatcgcattcttcaggatgttggcgctcagaaatacttccgttttctccggtttacagcctaaaacctcggcagccttagcggcagccaatgcgaccgcaaccggttccgtacaaccgatagcgggaatcacttcctgatgtattagtttgatgatttgtgtttgagttgttttatccatgaatatagacttctttgactttaatggggcaaagataagacatccttttcaaaacataggtatttcgattgcggaacatagataatttgaactatttctttattaaataaaggaatacccgacagaaaaatgtacatttgtttcatctaataaataattaataaattatgggaactttaggctgcataaatgatatgttacaacgggacaaagaaaaccgcgagctcaggaaattaagcaaagaacgcctaaaggaaacccgaaacaggctcatgaaaatcgggagcagtaccaaactacccgatacatccattgaagaaatgaaagaaattcgaaaaaagactatagagaaagaaaaagcagatgccaaccatctatccaaaataaaattacttttagccatatttgtcttattcgtcctcctttcagtatggctgttttattctctcatcagataagatctcatttgtcaccaccgacagttttaaccgtaaaggtttcctcttccgtgccgttgccacgcccttctttcagacggacgctgaacacagcttcacctgtacgcaacttcggggaggcctgcaccatgacattataggtgatacggtcatcgcgggtgattttggtgatcttgacaggttcggacagtttcagatgtttgcccttctcaacttttactattggttccacgtccaaagcatcctgaaagctgttattcacgatcacaagggagatatggcaggtctcacccgcattgatcttatcgtcgcgagtgacactgtcctcttccaataagatgtcttcgatctgcaaatcgggaaggagaacatgtgaagacggcgtataatttcccggattcctcttctccactcttaccacgtcacctgtatttgctgcgatctgcgcaccggcaattcctccgaccgccgtcccgacaaacgcccctatgtcaccccctatatcatcgtctatagcatttccgaccgctccgccgaaaagccatccgacaaaagcgcctatctgggcccctacgccagcccgatcttcccggctcatattcttcatcgatccgcatcctgtcagaaccaacaaagacactatcgcatataggactttatttttcatactcagttattttaacccttccaattaacaaacaaagataaccatccatttgatttaatgacatcggaaaggagaaaaacccctatccgattgcgtttttttatgtaagtttgcgcccgattaaacaaagaatgatgacaactcaattcaagactccgaccgcagacctgcaacatcagtacgatcttctgcagaaagaattcgaatatgaaaaagagatgtatcgggaacaaaccgaacgggccggcatacaccgccgcatccaacaaggactatgctggtatcctgtcgtaccgggaaagagctattataactccctgaaccaacttgtcgtagaaatagggcagctggaggacaaagagaccgaacacaattttgaatatggccgtccgatctgcttcttcacaacaaaaggaggcgggaaacctgaatacctgaacttctcggctgtcatcagttatgtgcaagacgaccggatggtcgtaatattaccctctcctaacgcacttacggaaatacaaaaggctggcgaaatcggcgtccagctttatttcgacgagaccagttacaagacgatgttcaacgccctgtctaccgttatccaagcgaaagggaaccggttagcttatctgcgggacgtcctgttaggcaaaacacccgccggccggcgcatacttttccccatgcgttttccctggctgaacctgtcgcaggaagaggcggtcaatcatgtattggcggcaaaggatgtgtctatcgtgcacggtcctcccggaaccggcaaaacgaccaccttggttgaagcgatctatgagactttgcaccgggaaaaccaggtaatggtctgtgcccaaagcaatacggccgttgactggatatccgaaaaactggtcgatcgcggtatccatgtcctgcgcatcggcaacccgacacgcgtaaacgacaagatgctttcttttacttatgaacgacgtttcgaatcgcatcccgactatgccgaactatggggaatccgcaaagcaatccgcgagatacaatccaatctccgtagaaagagccacagtgagaaggaaacagtacgcaaccgtctctcccgcctccgtttccgggcaacggaactggaagtaaagatcgacacggaactgttcgacgaggcgcgtgtcgtagcctgcacgctggtcggatcggcgaaccgggtgttgaccaaccgtaacttcacgactctctttatcgacgaagccgcccaggcacttgaagccgcctgctggatcgcaatcggcaaagcggatcgggtcatcttagcgggcgaccatcaccagcttcctcctaccatcaaatgtatagaagcggcacgcggcggcttagaccacaccttgatgcaaaaaataaccgaccggaagcctgaaactgtctcacttctgaaaacgcagtaccgaatgaacgaaagcatcatgcgctttccttctcgctggttctaccgggatgagctgcaatccgcaccggaagtcaagcatcgcggcatcttggaattcgatacccctgtcgtctggctcgacacagcggattgccatttcgaagaagaccaactcaccgacagcatgagccgtatcaataaagacgaagcgaccctgcttgtctcgaccttgcagaaatatatcgaaaagatcggcaaggaacgggtattggacgaaagcattgacttcggtctgatttcgccttacaaatcgcaggttcagtatatccgcggactgatcaagcgcaatgtttccttcaaacctttccgccgtctgataaccgtccacacggtagatggcttccaagggcaggagcgagatgtgatcatgatcagcctcgtacgcgccaacgacaaaggccggatcggtttcctcggcgacctgcgccgcatgaacgtcgccatcacccgtgcccgcatgaaattgatgattttaggagacgcaccgacactgacacgacatgttttctacaaagaattatacgaatatatccgggagaacggacaggtggttgacgttcacccccttcctccgccatgaccccttattgtcatattcataaaaaagccattggtccgaatcgaaactactaccgcatctatttcgattttataccccgtttaattcaaattacacgcaagggtaatatttttttaaaaaactactaattttatatactacagaaaatgaattgactaagcaaaatcgccattttcaggggatattgtattttgtgtaaagtctacttcatctcttccatcctcaaaaacagcacaaaatacatcttgacaaaactcttcttgagaaagaaagaaaataaaatatttgatatttttcaagaaaagatttgtttattcaaaaagttttttaaatttatggcattcatatgaaaaggatagctgccatattattgttgttgctattttcctgttcagaaaagaagcaaagtttgcctgagttattggaaacatggcaaggcaaagttgtgagtttccccacgaatcccgtatttacacgatatggaaaagataccgttgatttcaatatccatccgtctccctatactatattgttttatgtcgattctaatagttgtgtggattgcaaattgaagttgaacgaatggaaacagttcaagcaagaggtcgattcgtcaggtggagaagtacagtatttgtttttcatccataacaaacgtccaaagtatgtacgaaatattttgagaagtggaaatttcgactggccggtttgtttggaccagaaaaacgaattggatcatttgaaccaatttccggaagacgagcagtttcatgcttttttattagatcgtaacttccgcgtgctggtcgtcggtgatccgatgagaaaccttgaaatccgtaatttatatttgaaacatatattaggaatgcagcccgattgggtgaagctggaaacgacggctatagtagatgatcccataaaggacgttggtgaaattgccgggaacaaacctgtccgacactcgttcaaaatccgaaacacaggattatcgcctttaattgtcactgatgtcgcaacgacatgcggttgcatgcaatacgaatatgataaaaaacctgtagattctggaaaagagttgatttttacgttgatttacacgccgaaacattcaggtttcttttcagaaacggtccttgtacgttgtaatacgaataaagctatcaaaataatattgaaagggaaaataaaacctgcacagcaggaattataaactataaaaacaatgccttatgaaacagaaactgttttctctgctcgccctgttcctatttgtgagcattgggcttactaccgacactaaggccgatagtatgggtaatgaactgaactcctccgtttcggaaaatctgaaagcattgactgctgggaatcctaaaaaacaatgttggatggatttaacaagcacaaaaacaccttgtgctcaatacgggcaaataggatgtgctccatgtgatgacttgttacctcccggaccatttcctccaacataccctccaaatccaggaagttgactaatgtaagatttttgtaaaattcgtaaaggaggtgtgtcgaaactatcctgttcccgcgcttgacgcgggattgcattaaaaccggccctataaaaacctgattgataaggcctgtccttttgcgaccccgcatcaagtgcggggacaaagagattttgacacacctccttgtttaattaattatcgaatcaatgagtatgatttatagatggatattattcatagccttattcggcatatccctgtcctgttcggatcacccgaagaattcatcttccgatatggaacctttggatatcgtcgaacttcgtcctgcagataaatggttgaagtttccgatagatgaggatacggacataggatggtatccgacagtaatagaaaaagacgagcgagaatacataattatcaaaaacagtggaatgcctcaacttctgttttatgacgtggataagatggaatgcgtaaggaagatcacttttcaaatggaagggcccaatgcgataggaaaagctcaccgatattatgtaaaaggatggagtgagttttactggctcccaccttctgcacaacaatgtttattcaaagtagatgatgctggagtggttcaaggatgttatgattgtagcaaggatgacgctggaaattttttgccgcccatagagtctattgtttttattgattctttggttcatatacaattgtaccattataatcataatcagcaagaagaaaagacatctgtggctgcggtgttggataccgttcataaagttgtcaagcaattttctttttatcatccttcaaaaccgacgatggatgatttgtataaaggaagattacgggctggtgatgaatatgtgtcttgtttatttgatggagctaactttgtgtatgtttttggccagaatgattctatttatgttgcaacagcagatcataaaaacgtaaaaggttataatgctaaaagcaagtacttgaaaccagccaaatatattccaaaacctcattatgctgctttaaatgattatttgagagaaagcaaccagcaacaattttatcattacatctactacgacaaataccgcgaagtctattaccgcctcgcctacccggaatcggaggtcgatccaaaagagaaccaacaggacatttggagtttcggccgtcggacctgttcgattgtgattttggacaaaaacttccgcatcatcggcgagacactgttgccggactaccgctatcagaaccgttcgatcgttgtcctgaaagacggcctttacatctgcgacagccattacaagcgagaagattatgacgaaaacgtgtggagcttccaacggtttgacttgatgaagaaaaaataagaggaggtttttgatctttggctaagcgcggacaaggttatttttagcacggttgtcctttctgtcaagcgagcggaagcaaaaattttctatatttgtatcattaacaaaaaatacaaaaaggccatgaagtataaattattagttctcgacgtagacgggacgctgctcaacaaccagaaagagatcagcccccgtaccctggctgcccttctgaaggtacagcaaatgggggtacatatcgtattggcatcaggaagaccgactaatggagtcatgcccatcgctgaaaagctggaactgaatcattatggaggttacatcctttcttacaacggcggtcagatcattaacgtgcagaccggtgaactattattcgagaagcgcatcgatccggaatggatcccctatttcgaaaagaaagcaaagaaaaacgactttgccatcttcacctatcacaaagacttcatcctgacggacaaaccggataacaagtatgtcatccaagaagccaacctgaacaagatgcagattgtcggtgtcgacaactttgccgaagccgtcgacttcccgccctgcaaatgtatgctggcaagtgacgacgaagaagcgctcatcggtttggagaatcattggaaaaaacgcctcgacggtgtgctggatgcattcaggtcggaaccttatttcttagaagtcgttccccagttcatcgacaagggaaacactttgggcgtgctgatgaccaaactgtccgtatcgccggaagaagtgatcgcgatcggcgacggcgtttgcgacgtgaccatgttgcaacttgccggtgtcgggatcgcgatgggaaatgcggaagattcggtgaaggcttgtgtggacaagacgacactcaccaacgaagaagaaggcgtagccgtagccgtcgaacggacaatcctggctgaaatacgtccgacggaagttccgctcgaccaactgaatatgcgtgccagacacgccctgatgggaaacctcggcattcagtatacctatgcatccgaagatcgtgtagaagcaaccatgccggtagacgaacgtacccgccagccattcggtatcctgcatggcggagcgacactcgcactggccgaaaccgttgccgggttaggctcgatgatcctggccaaaccggacgaaatcgtggtcggcatgcaggtcagcggcaaccacatgtcatccgcccatgaaggagataccgttcgcgccgtcggaaccatcattcacaaaggacgttcttcacacgtttggaatgtcgatgtatttacatccactgataaattggtatcttccatccgtgtagtcaacagcatattaaaaaagaaatgacaccagacgaattaaggatttgtaacgtagtcgacacattgatcagaaagaaccggagttttgcactctggcggataccaggagaatcgcctcgtttcgccatgcaagcctccggttctgcacgtattctttatcatatcgaggaactggacgaacagagtggtttcgtcattgctcccttccatgtaagcaaacagcacccaatcgtactgatccggccggacatccagaaacttccgcccgatgaggaaacaaaagtttcatacttgatgcctgcggaacaggaattccatcatagtgaaacgcttgtctccttcctcgaaaacccgaaggaagactacagccgccgtttcaatgccttcatcgaaccgctacgccgaaagcagttcgagaaactcgtgctgtcgcgctgccagacgattccggcagacagagccaacttctcccctgccgccgctttccataaagcaatcagacggtacaaatattcatatgtttatctctgccatactcccgcgacaggcacatggctgggctgcacgcccgaaatcatcctctccggcgagaaaggaaaatggcatacggtcgcccttgccggcacccaacctctccaaaacggggaactaccgatagaatgggacgacaaaaacagggaagaacaggaatatgtagccttttacatacgcaaacaactgcaagcattaggtatcaaaccgacagaaactcctccgatcccggtacgcgccggcgaactgtcgcatttgagaagcgacttcagctttccactgcccgataataaaaaactcggcgaactgttgaaacggctccatcccacgcctgccgtttgcggactgcccaaagaagagacatatcgctttatccgggagaacgaaggctacgaccggagctattattcaggctttatcggttggttggcccccgaagggaagagcgatctgtatgtaaacttgcgctgcatgaacatcttgcccggatcatttgttttatatgcaggcggaggcattcttgcttcttcggagatagaaagcgaatggcttgaaacggaagcaaaaatgcaaacaatgaagcgactgatcaattcaattgacaaatcataaataatataacccatgatagcaaaaaaactgactgacctcataggcaatacaccgttgttggagttctcaaacttcaacgcaagtaaagggctgaaagcgaaagtaatcggaaagctggaatatttcaacccggcaggtagcgtaaaagaccgcattgcattggcaatgatcgaagatgcggaagaaaagggcttgctgaaaccgggagcaacaatcatagagccgaccagcgggaacaccggcgtaggactggctttcgtctcggccgccaaaggttataaattggtactgacaatgcccgaaaccatgagcctggaacgtcgtaacctactgaaagcattaggagccaacctgatcctcactcccggaacggaagggatgaaaggtgccatcgccaaagcggaagcattgcgtgatgaaacacccggctccattatcctgcaacagtttgaaaacccggcaaaccctgcccggcatgctaaaacaaccgcacaggaaatctggcgcgatacggacggcaaagtcgatatcttcgtcgcaggagtcggaacgggcggtacggtaagcggcgttggcaaaggactgaaagcgcacaatccggatgtcaaaatcgtcgctgtagaaccgaccgactcggctgtgctctcaggcggtaaacccggaccgcacaagatacaggggatcggcgcgggctttatccctaaaacctacgacagctcggtggtcgatgaaatcatccaggtagaaggagacgacgccatccgcacatcacgcgaactggcacaaaaggaaggcctgttggtcggcatttcttccggagcagccgtatatgccgccgtgcaactggcccgtctcccggagaacgaagggaaaacgattgtagcattattaccggatacgggcgagagatatttgtctacagcattgtatgcgttcgaggaatatccgctttaagaattgacaattgataattgtcaattctccttataatctttccgataagaacaagtagtctccgtcgggaaatctttcgggactttctgggttacttttccggttgccgcccattcggcgccacgaagcaaaagcacctggaagcccgtacattgcattgctatattatcttccgtagtagcaccggcatggccaagcatcgtatggaagatgcgagcattcccgtaatcgaccgtaaataccagcggttcttcacgaccggaaccgtttgtttccttatccgaataggccgtgtacaaaatatcccggatattgcccggtccccgcatacggtcgtaaagttcatctttggcatgacgccatttcaaaggcaggcccttcacaaccggatgcaccttgtcacgcccgttcagcacatattcgtgctggcgtccatgagaaccacccggacccgccgaactgtccttgaccagttttccgtccttccaatacacataagggccggaattctcattacgtccttcccaaccacccaaagcacagatcttattgaactccggccatttggagaaagcattgtcagctgcatgataaatgacaacaccaccgccgttctgcacatattccaggaagcggcggttcgtctcctccggccacgaatctccgttatagtccagcactaccaactggtaagggctaaagtcgagcacaaaaccggacatatccttgccctgttcgggagagatggcaaagtccacatcaaaacgaccggaattttccaggatttgtttcagcacaacatggctcacctgccagttatggttgttttgtcctgtgatcagtaatgttttaatcggtttacgcgccgaaaccgtacaggctaacaagagggaaaagacaacaaaaaacagcttcccaaaatgtaaatgtctcatggtactttatggtttaaagatttgtttgaggcaaatgtactaaatcaatatgaaatatgtacttttgtggccttaagaaaaaatacatccatgatgaaatatttatcccgaatattattgataacattcgtatttgtcttttcagccacttatagccatgccgacagttggcgcgacaaaacagaactgctcatatattctccgcgctatttcggtccgaacgcctttccgatcccggaaatgagggacggacaggtgagcgagcggtacgaagtggaagtacggggcgaataccattattatacgggtgacaagacctgggacatcgtggggcgtgccctgctgcccttcttcagggggcgcgcgggaatcgaagtgaactggtgcttcaaggaaaaatataagatgacaccggaaacgcgtgacgaacgctttgccgtggatacggaaagcccgatcaaatataacggcgacatcgttatcagctcctttttccaagtcctgaaaagcgagaaatgggtagacgcgaccattagcgccaacatcaagacagccagcggaggccgcctgtgcgacgcccgttttaccgatgccgcctcctactggttcgacgtaaacatggggcgtaacctgtggaaaagtgccgacgggaaggcctcgatccgtatgcaggcgctcgccgggttctattgctggatgacgaacgacatggtgcatcgccagaacgacgccatctcatacggagtcgggttcaccggtaaatacagaggcttcacgctcgccaccaacctggccgggttctacggatacgaaaacaacggtgaccgccccatacattggcgcaacaacctcagatacgagatcaagaaaaacataatctccttccggtatacacacggaatgaaggataacctgtacgagacttattcgttgggatatatcagatgcttttgagaattgaaagctaaaccaacggccttcgctccctgtttaagggaagatgaagattaatcggatagtaaaactgaagctggtagatgccagactctatttcgtgagtctgatcgtaggactgctgaccggattggtggcggttccttaccactatctgctgcaactattcttcaatatgcggaagaacttcttccagtcttcgcctccctggtattaccatatcgtcttattccttgccctatggggtatcctctgcttcgtcgcccggatggccagacggtggccttacatcggaggcggaggcatttcgcagacacggggcgttatcaatggacgcatcgagtatgcacattcctttcgccaactgctggctaagtttgcgggtggtgtgctgacactcagcagcggtctctcgatgggacgcgagggaccttctgtacaaatgggttcctacataggtgacctggtcagcaaatggggacatatcctgagcggcgaacgcaaacagctccttgccgcaggcgcaggcgcaggactggcagctgcctttgccgctcctcttgccgccgctacgctggtgatcgaatcgatcgaacgcttcgatgctccgaaaacggctatcacgacgatcctggccggtgtcgtcgccggagcgatcgccagtacgattttcccgatcaacccgtaccacgacatacaggccatcgtgcccgacctgtcgatgggactgcatatcaagctgtatatcctgtttgccgtcatcgtatcggttttcggcaaactctattcactgctgatgctatacgccaaacggatgtacccggccatccggcaacccgaatatatcaagctgttaggtcttctgggcatggcatacatcatttcgctgacggtcactgatctgaccggtggaggcgagcagttcctgatgcaacaggcggaaggcggcaacagcaatatctattggattgcagggatgatgttcctgcacatggtatttaccgttttttccttctcctccggattgccgggagggaactttatcccgactctggtgacaggcggactgaccggtaagctctatgccctcatcctggtgcaacacgggatcgtcaggatggaaagtgtgagctatgtcatgctgatcggaatgggcgccttcctggtcgccgtcgtgcgcactcctatcacagccattatcctgattacggagatcacagggcatttcgaagttttctatccttccatcgtcgtaggaggactcacttattatttcacggaactgttgggaataaagccgttcaacgtaatgttctatgaagagatgatcaacaaaccggccttccgtgagcagaagcggctgactttggacgtggaagtgatggccggagcctatttcgaccgcaaggaggtcgatacgctcgaacttcccaaccattgcataatcatgaatatccaccgcgaccgcaaagacatctcccccaccggacaaaccatactccccggtgaccagctcaccatcgaactggacgcccaagatatagagaaactgtacgagccactggttagcatggccaacatctactaaaatatcccgaccggcaactttaaacgtcctcccggccatctcaaatcattggacacaaaaaccaaacagcctctcaggggaattataatccagaattatcaggtatttatgtaaaaatatccgtccgcgagacgatttcagggaagccggatggttccttaccataggagaaatcaattatcgcattttgccgaacttacggatgggagccggctatatgtcgttagtccgctacaaggcatcggaggaactgcgcaaccggttctgattcaagcaggaaaacatctatccacaaaacgaaaggaaacgtaccgatatgcatttatgcagaagccattttaccatcttaaggcacttttttactaaagacaagcagaaaaagagcggaaagtaagcagaaatggttgacaacacccccatcttccggctttctacacccggatgttaccaccctccacacccggatgtccgaaaagggtacacccgggtgtccggagtcatatcacactaatcctttgtaattaagatacatacttagcagcaagatcatatatatattgctaaaatcccagttggatgtgtgacactgtgtgatacaggcgtgatacatgaatccggcatgtatcacaccttgcacaacatggatatcaacacatacaagacaaaatgtgatagagtgacagagaaatggcgattctctttctgtcggttttaaggctgcttatcgcctcattcggctgtcacatataataggcataaataaaaatatcactatctttgccctcggaatccaaaaacgttcctttatattattcaccgagtgcttgataaacctcgttaaaaacaagaaatatgcagaagacatctactgtaaccgtaccattcatgctgttaggcatcctgttcaatatctgcctggtagcttcaaacctgttagaaaccaaagttatccaggtattcggcatcacagcgactgccggactgatcgttttcccgatctcatatatcatcaatgactgtatcgccgaagtatggggattcaagaaggcacgcctgattatctggagcgggttcatttctaatttccttgtaatcggatttgcgcaattggcggtgatgttgcctgccgccccattttgggaaggcgaagaaggtttcaacttcgtgttcggaatggcaccgcgcatcgccatagcaagcctgatggcttttcttgtcggttcgttcctgaatgcttacgtgatgagtaagatgaagattgcttcagccggaaagaatttctctttacgggccatcgtctccactttggtcggcgagagtgccgattcgatgatctttttcccgatcgctttcgccggactgataccgataggcgaacttttcattatgatcggaacacaggcggttctgaaatccctctatgaagtaatcatccttcccgttaccatccgtgttgtaaactatatcaagaaggtggacggtaacgatgtgtatgacgtagggacatcatacaatatattaaatgtgagagatttatgatttatgattcataattccaaacaaatgcgaccagtcttcacgaggttgcggcgtataggtatggaatcctagtgattccgccgtacggcaattggggacggcatcatctatgaaaagtgtttcttcaggacggatatcggcatcttgcaggacatattcgaaaatttcggcatcgggtttcagcagatggaggcggtaggaaagataaatatgattgaaaaagtcggaagcatggtggcctttataggaaaaacaggtcttttccgaccactcccaatgaatctcgttcgtattgctgagcagcatcgtattgtaacgcttgcggaggtcgagcaaaagatccagcttataatccggaacatcatcgagcatggcgatccaggcggcatctatctgttcgtccgtcaaaggctgtctggtcagatgacggataccgtcgcgaaactctgctaccgtaatggaaccgagctcgatcttcatgaacagatccttatgctggtagttattgacaatctgctcgcgtatattcgcgacccccaaactctcgaatgcctcgatgcaccgattacgggtgagattgataatcacgccgccaaaatctataaccaaattttttatgccttccatgaccttcttttaattgacaattgataatcgacaattttgattctaactatttactaccagcggcggcgacgtcggtgatgccgttgccgctgtttatattgacgtatcctgcgatataccagccagacaaataacactccgaacacggcaaagatcagcaagacgatccctgtattcaagttatctcctttcacgcggctccacatttccaaaaccagttccgtccgatctccgaaatcgcggatcatggcacaacgttctaccaccttgcggtcggggtattgtaccggattgatccggatgctatccgcatcgggaccgaagaaataactcaagtcggaaactttctcgattgtcgaatcgatcttggcttccataatttcgggagtcgcaatggcactgacgtaaccgatggcatccatattccgcaaagcgacgtccggacgacaaagataatcaataaaataactggccgcctttacattacgggcatatttagggatcgcccagccgtcataccagatattgctgccttctcggggcacttcatagtccagttccaccccgacagcctccgcttcgtccatcgcccagaccgcatcgccgctccaggtaaaattgagccaggctttgcctttcgtcatcatttccttgccaaaatcggcttcccaaccggcaatgttgggtttcatctttttcagaagttcttcggctatggcgatcgcttcgggagaattgtcgttcatcagttgctcaaccgtcacggtcccatcttccagttccttcgcatgggcgtagataatggccgtaccataggagtcacgatagctgtctttcatcaatatcttgtttctgaacttcgaatcccaaagacactcccagctttcgacctctttctcctccacgaactgcttgttatacaaaatcccagccgttccccacatataagggacgacatagtcggtcgttttccgtcccggctggcttagcttgttcagttgcccgcggatatagggagagacattatccagataatccggtgtctttccgaaattgcggtctatcgggacaagaaggtttttcttcaacatccgttcgattatatattcggacggacagatcaggtcgaaatcttcatgcccgcgttcgatcttggtaagcatgatctcattgatatcgaacacctggtagatgatccggatatcttctccggtctgctccttgtaccaagcgggaaattcggccaagacatcctcgtcgatatagtctgcccaattgtagactttcagaatatgactgcgctcctcatccgtacgattgcatgaagacatgaaagtcaaaagaaagaggcaactcgctattattgtaatcagtttattcatttcctgcttttctccattagcttttggacttctccgcccgtttattaatcacaatcaaaaggacaagcaccgtcacgaaaatgatagttgacagcggacgcaactccggtgtcagtccccctttgcgggcatccgcataaataaaggtcgatagggtttccagtccctcgttgccgatcgtaaagatggtaacggcaaaatcatcgatcgaaagcgtaaaagccagtataaagccgctgatcatgcccggacgaatctccggcaggatcaccttgcgcaacgcctggaaaggagtcgcccccaaatcgagcgccgcctcatagacattctggttcatctttttcaggcgtggcatgacactcagcaccacatagggcgtgcagaacgtgatatgcgccagcacgaccgtcgtgaatccctgtgaaacgccaaaactcacgaacagcaggaaaagggatacgcccgtaataatatctgcattcatcatcgggatcgcattggcaaaattcattacctggcgggtccgtgatcgcaggttgaaaataccgatagccgcaatactacccaacagcgtggagacggtcgccgcgatcatcgcaatggcgaacgtattccacaacgcactcaccaacgaacgctgcacgcctcctgtaaacagcgaactatacaatttggttgaaaatcccgtccagtttcccaagactttcgcttcggtaaacgagaaaatcataataatcagaatcggggaatatagcagcaccaacagtagccacaaatacccttttgccatccatttcgtcatcatatcacacctcccccttcgttcgaagcactgtcctcttcattcgtaaagaggatggtaacaccaatcagcaacagcataataagagaaagcgccgctccataattccacataccgttatagatattttcttgcacggtcgtaccgaacagtttgatgttattcatcgtcagtaattcggcaatggcaaacgtggaaaccgtcggcatgaaaaccatgacgatcccgctcatcacgccgggcatcgaaagaggcagaatcgttttcataaagacctgaaacggattggctcccaagtcctgggccgcctcgatcaggctgcggtccatcttttgcaacgtattataaatcggatagatcatgaacgggagaaagttatacaccataccgaaaaccaacgccccctctcccaacggcaggttcaggaaatcgaacaatgctaccgtagccagcgtacggatcaggatattcacccacatcggcaggatgaatagcacgaccatcgtccgggaagtgttaaaacgctcctggctcaggatataagctgccggatagccaaggatgagacaggcaagtgtggtgataatagcaatcccgatcgaatagacgaacgtattcatcgcttcggggtgtaccatgaacttacggaaattagcaaaagtgaacgctccgtcggcatctgtaaacgcatataatacgatcaacaacaagggcattacgacaaagacagccaaaaacagggcataaggaatcgtccagttcttacgccgcataaaaaaagctgaaatcttacttatcacttccttcctttttagttgattgaacaatccgtatattttcgggagcgatcgtgattccgacccggtcgccatcgtcccaaacatcattcgtatcgacaaagatatcttcgtcccagtcggtaaacaccgtcagatgataatggttgcctttgtagaggataaatttcacttcaccggtcagacggccgtcttcctcgttgtcttccagaatgacgcggtcaaaatctacttcgacctgcacgggtgcttccgagtcaatgccggatacctctcggcattcgaacgtacagcctaaaaattccacatgcgtggcatccaccatctttccttcgaacgtattgcagatacgttcctttttcatcacatggatatcaaatggtttgaccagcaaaccgacttcctgcccggcatcgaaacaatggtagtcctgtaccatgaactcatagccttccggcgtctgcaccatcatctcgtagtgaacgcccttgaaaatggaggaggtaaccgtcccggtcagcatggcggcttcagacggctcgaaaatataaatgtcttccgggcggagcacgacatctaccggggtccgttcgccgaaaccttcgtctacgcattcgaactcatgcccggcaaaggataccaacttatctttgatcatcagtccgttcagaatattgctttcgccgataaagtcggcgacaaaggagttgatcggttcgttataaatgtcaataggcgtcccgatctgctggatcttcccttcgctcatcacgacgatcgtatcgctcagggtgagtgcttcttcctgatcgtgagtaacatagataaaggtgattccgagagacttatgcatttccttcaactccatctgcatatccttgcgcatcttgaggtcaagagccgccagcggttcgtccagcaggagcacttccggttcgttcacgatagctctggcaatcgcgacacgttgttgctgtccgccggaaagggaatccacatcacggtactcataatcggtcattcctaccatcttgagggcctgcttcacctttttctcgatcacgacagccggaagttttttcagcttcaggccgaaagcgatgttattgaagacattcagatgagggaaaagagcgtatttctgaaatacagtattaactggacgtttatgagggggtgtttgcgtaatttcttttcccgcaatggttattatacccttagaagcagtctggaatccggcaatcagacgcaacaatgtcgtcttcccgcaaccggacggccccagaatggttacaaactcgcccttacggacagacaaattcacatcattcaatacggccttgtctccaaagaatttagacacatgctccacaccaatgatgcagtcagatttttgcatagacagattcccctttaccaatactgattaaacatatttccgcttcttcacgtaaaaagcggcacaaaggtaacaattaattgataattgagagttgaaaattgaaaattacggtagagtcttgctcttaggcaacaccaggttcaaaaagactcccagtaaagccgaaagcccgataccggccatcgtgaaaccgccaaattcaatggcagcaccaccaatcccgaaagtcaggatcaatgagacgatgatcaggttgcgagtgtcgcccagattggtccgattttggatcaagctgttgatgccgacagcggcaatcgttccgaacagcagcaacatgatgccccccaacacggcggcgggaatcgatttaagcaacgcgctgaccttcccaaacacagaaaagacgataccgcttacggcagcaatacggataacggccgggtctgtaatctttgtcagcgaaatagctcctgtcacctccgaataggtcgtgacgggaggaccgccgatcaatccggcgacgatacatgccaggccgtctcccaacatcgtgcggtgaagtcccggatcttttacgaaatccttgcccgtcacctcgttgattgcgtacacatcgcctatatgttcgatcaccggagcaatcgtcaccggaatcataaaaataaccgcttcccacgacaatgaaggctttacaaattgcggaaatgcaaaccaaggagcttctatcacaggcttgaagtcgatcaagccgaacagactcgcagtcaggtacccgacgatgattccacagaagatagggatcaatctcaacattccccggcccaacatagaggcgagaatagcggaaagcagggctaccagtgccaacggccagttctcttttgccatattcacacctgagcctgccagcgagaggccgatcagaataataaccggcccgatcaccaccggcggaaaaagccgcttgataaaaccgattcctctccaccggaccaacaagctcatcaacccatagacggtccccacagccaccaggccggacatcgtaccgggcaacccatacaattccgtcgcctttatgataggcgccacaaaagcgaaactgcttcccagaaaaataggaactttccctttcgtcaccaaatgaaagatcaacgtgccgataccagcagtaaaaagggcggtagaaggatcaaggccaaccagcagaggaacgagaacagtcgcaccaaacgccacaaaaaggaactgaacgccaacaaccgttttctgaatggggttcaggggtttcatattatccattcgttctttatttactttttgcaaatataatataatccagacatccagcaattcaattcactcacctattttttataataagcagccgttcataatctaccccttacttttaacttagtgcaacccggataaaaagtcccgccgtaaattaaaacacggcgggacgtctctacgtttttttccagtttacaatcaaaaaacgacctacccctacttgggactcttcaattccaggaatgcagtcggaaggccttccgatttaacagcaaccacgctattaccctcgttccgtttgatacggatcagggcacgaccattatacgcctgtactttacgactaccggtcgaagttcctaaattgcagatcaggctgccatctccggcaatctcaaacgtaatctgctttttggagctgagacaacggatgccgtttttatcgatcagttgtacctgtaccaaagccgtatctccctcttcggaaagcaagctcacttggcaagcggcttctttatcccatttagcagtctggtattcctgacgaatgacatcagaaacctccttcttctcctttttctttacaccgacagcccgtatttcgttcatgccttcctgataaacacaattccagcgcaacccggcagccggataatcctgactattacgccgtttcacaccctggctcacaccattgacaaaaagctccacttcgtcgcagttagaatataccaagatttccttgcggtcatcttttccaccccagcgaaccggccaggtatgaccgtagatatggatcatcggcttctccgtccagtaagactggaacacatagtagctttctttcggagtaaaatcgcgttcaaccacccccttctgattgacataagggacaggattgtcgggacggaccggagtcgaaaaatctttaaaaggccagtaggctgtaccggtcagccacggcatcgtctcctgctctttcagatgccagtcgatcagacggaccacataactttccgaccaatcgccatcgcgcgaagcacgtggaacgccaccatacaaggaagcatcgccggcacgttcatcaccgccctttcctgcctcgatgttcttcagattataaaaagcatcttccgaatgacgacgggcatggctgtcacctccccactctacatgcaggaagtgttttaccttctgcatctcctgttctgagatcgatttataatcggtaaagacaccccgataccaaccagcccagatagaaggtgaatagacatcaacaatatcattacaaaattcacaccggcggatcgccgtcatacgtgtgtcgtctaaacggtgcgccatgtcgtgcaactctttcatgaaagcacggatcgcactcttgtcgaacgtattgaaatcgttaggccagtcattctcattacccaacccccagatgatgacagccggatgattatgatgctggacgatcatattagcaagcatccgacgggcttgttttttgtagacatcgcctccaagaccgccccgacaccaaggaatttcttcccataccagaatgcccaattcgtcgcaaaggtccagaatgatttcagattgttggtaatgtcctaaacggataaagttcacgcccatatctttcatcatccgcatttcacgacgcatcatatcttccgtcatggcttgtgccacaccagcgtgatcctcatggcgatgcgtacctcgcaacagcaaacgtttgccgttcaggaagaatggacctttgtccttaaactccgtatggcggaaaccgaagcgttcttccgtcgtgaaagtctgatccggtgtctttacagtcaactcgcaagtatagagttgtggcacatccacgtcccacaataccggattcttgatcttcatctctgctaaaagctggtcacccaaaggaagtattccttccagtgttttcgagaagactggtttacggtccacatcgtaaacggaaacggtcacatccgccttccttatatcttccggattataaaacgaagttttcaccttcaatataccttctttcaagttagaagagagggaagattccaaacgaatctgttcaaaagaaacttcaggcaggtacaccaagttcaaataccggtacagaccaccatagatattgaaatcagccagatcggatggtatcatttccagatcacgtgaattatcgcaacggatcgacaaaggtactttccctttgaaacgttccgcatctttactgccgagaaatgcttttaccgcatccgtaatatcgacattccaactgtcataaccgccaacatggctaccgacatgagtcgtatagacatagacatccgtcttctgtcccgccccgtcgaaatcgagtacgatccgcccgttccgatagggattgtctatcgccagcaaagttttataccatcccggaccttcataataattcacgtccggatcaacagcatcttcggcattaaaacaatgaggtaacgtaacaggctgccagatgggaaccgcctccgaactgccgggtgcggcaggacgtacagcctcccagattccccccaaatcacctttcagatattcccaattgttcgtcagccgaatcttattcatagcaggcactttcgccacagccgacagaacggacaaacacaataagcatgcaacaaacaagtacttcatattctaatattcaatttaaaattcaattatttttacaagagagcagttccttctttttccaatttggcttttcgcaacaaggcttccagatagtaataatccgcatatacgatcggcacatccacttccgaaccgtgagtcttggaaccggtactatgcaaaagcaggaaaccacagtctttccctacacttgcccgataacggttcgtcagattttccaatatcctatcagccctatccacatatccggttctattcgtttcatcatacatactcaactcgtaaagagcagaagccgtaacggtggccgccgatacatcacgcggctcgtccggtattcctggagcattataatcccaataaggtatcaaatcgtccggcaatgtaggattggagaaaatataagaggcaatttgtttggcacgttccaaaaattcaggcaatccagtttctcgatagcacatcgtatagccgtacaatccccacgcttgtccacgcgaccaagccgaagcatcggaatacccctgatgggtgtttttatgcaagactgcgccggtcaacgtatcatagtcgataacatgataggaactgtagtccttacgaaaatgattcttcatcgtagtacgggcatggtcgactgcaacctggtagaaaatggaatcgccactcatacggaaagcccagaaaagtagttccagattcatcatattatcgatgattacgggatactgccatttatccctgttatgatcccaggaacggatacaacccacttttggattgtaacgtctgatcagggtgtaggcagactgcaacagaatatccttataaccagaatcctgagtcaaccgataaccgttaccatagctacaatacattttaaagcccatatcgtgggtactcccattccatttctcctgttcaagcagttcagtctgtttcctggccttctccttccaaaaatcatctctagtatattcatacatataccaaagttcgcctgggaaaaaaccgcttgtccaatcatgggacgccaccatgcgcaggaaaccgttcggatcgatattgcgaggattggcaagcagcttgtccgtacttttataaaccgaatccatttccacgaatgcatgtttcaactgtatatcggcaaaatcaaaattcgaactgataatatccctcttgtccaaagcacaggaactacagacaagcagaaaaacaaaaaaaagaattttcagtttcattttgtccattttgtgttataagaaggggtatgaaatcatcagtcattccataccccaagattatttaaacctactcaaaaattttcttacaaattcggattgatcaatgaatcatgctccggacaagggaaatacaaccgttcttccgttacattcttcaccttttcaggaaaatttttctggaaatattccttcattaccgtcagataagtgccccagcgaaccaaattgaaacgatagatccgttcgtgtgtcgtctctaacgtccattctttttggattgcctgacggaaagtctctttagacaaaccggacaagttatccaaaccggcacgtacacgcagttgattcacggcatcataagctgcagccgtcggaccattggcttcgttttccgcttcggcaaagatcagcaagacatcggcataacggatgataggaatgtacatatccgtacgcttgttacgctgtgagaaattttcacgacctccatcacaccatttctttccatgtggatacggactaccgaaattctcagtcgtataggttttattatcaactgtactgacaatttcggtcaagaaggtagcggctttccgtttatccttatcatcaaatttatcgatataggattgtttcgtataaaagaatccccatcctgattcggacccgatactggtcggacgccactcggctccacactggttatctcctaacccatctgcaaaattcagggcaaagatcgattctttgttataccgattgttgaccagccaaagatcggcataattttcttccagcttaataccgtaagtagcggcattatcaatgacttccttcgctttggaagccgccttcgcccacatggtattgtctttaacctgttcaccggccatcgtgatataaacccatgaaagcaaagacttggcggcagcgacagtcggacgttccgttccagaatcccattttacgggaagattggcttctgcatattccaaatcttcaacaatcttattatatatttctttagccggtgtctttgtcatgttattcgcactggtaaagtcattcaccggcgtgtccagataaataacatcattaaagatacgcaccagatagaaataggacatcgcacgcatataacgggcagctgcgacataacgtgtcttgacctcatccgaaactttcgaagcattcggaactttctcgatcatgatgttagaagcattgatacaagcataaaattgctgccagggcttataaaggctctcgttatcgctttgccaagtcaaagagttcatttcatcgcgagccacattattggctgtagcactgacaacagcatcagtcgttgcttcggctataaagttaatatgacgttcgaagttgttgctacgccaataagacagcgatcccatcagcagcatattgcattcagcctccgtgttcggtaagttttcaggcgagaggaaatctttcggttcttccgacaagaaagactcgcaactactcatcaatagcatcagggagcacacccctgcaactgctttatatatatatgttttcattttcgtctttatattaatggttcaattataatgtaagattcaatccgaaggtataagagcgagttgccggataactaccaccgtcaaaacctaagttatagttacctgtacgggaactgacttcagggtcataaccggaatagccggtaattgtaaataggttctgtccgctcagatagaaacgtaagttagaaatgccccatttggatgtaactgatttaggaagagtatagccgaacgtcaaatttttcaagcgaatataagatccatcttccacaaaacgagatgaagacggacccacacccttgttaaatgcctgttgcgtattcgaagttccttcacctctccaggaatcctttacaaacgcaaaagcatttccggtattgttcgagttgctcggtaattcgctgaaagtcactttcaacaaattatagacatcattgccataggttccctgaaacataaagctcagatcaaaattcttatacgaaaagtcattaccaataccaaagataaagtccgggttagcattaccaatgatcgtacggtcttcagtcgtaatcttgttatcaccattcaaatccttgaacttcacgctaccgacatcatcttttgtcagccccaacgccttggcttctgcctcattctgatagataccgtcaaagacatatccgtagaagttccccaacggctcaccgaccttcacaataccagtttcattgaaaccagctcccaaagcacctccggaaccatttgtataaaagtattcatcatcgccaaggtcaagcactttttcccgattcaaagcgatattcaaagaagtagaccacttgaagtcacccactaaattctgtgtattcagagaaaattcccaacctttattggatttactaccgatgttctgtgtctgtgaagaataacctgtatagtacggaaggatcttgtcataatgcagatcgactgtctttttataataataatccgcaaccaaagatatacgtccgcccaatacgctcaaatcaatgcctatatccgtctgtttagttgtttcccatttcaagtcgggattcggtacacgacctggaacaagagccactgcagaacttccgtttaggacataactggtcgtactgaaactagccaacgactgataggctgtaatcgcctggctacctgtttcaccatagctggcacgcagtttcaggttctgtatccaagaaatgtctttcataaaatcttcctcactgatacgccatcccaaagcagcagaaggaaaatatccccatttattattcttcgcaaacttggaagaaccgtcagcacggaaactaacagatgccaaatatttacctttataagcatagttcacacggcccaaccaagaagcaatggcagaatggtttccaccggaagcgacagacaacagactgctattggcaagtcccatattccaataaccaagcgattcgatgtcgaaccctttaccactgctgttattgttgaaataatcggaagcctcagcagtaaaaccggcaacaacattcaaagagtgatctttattgaatgtcttggaataagtcaacgtgttttcaccaagccagtttgtggtttcctgatcgttcatgtaagcatatccctgccctttataagaaagaagattctctccggaagtaaactggcgttgtttacggtcgctatatgtgtaagtccaagctgtcttaaatttcaagccgctcaagatttcccattccagaaaagcagtaccctgaaaataattacggaatttatccacaacctgatcattaatcagagctaccggattattcatctgtgctccatcctttagcggaccgctaaggctgccgtcttccttgtagacagggaccaatggcccaaaacctaaagcagagaacgtgacaccaccaccatcagaaccgttcatctgattgacactggcgttggaagacgacgaacgggaagcattgataagagctccgaccgtcaccttctttcccagtttctgttcgatattggcacgtatgccggcacgattgaaatcagagttcttcacaataccctgatgcatcaagtagttaccagacaaactatagcgtgtcgtttctgttccgccacttacagacaacgaatggcccgtgataggggccgtacggaacacttcaccctgccagtcggtattattcaagttattaggatctatccactccggtattttcaatgctgtcgtaggatatttctcctgtgcttctttcaataagccatatagttcctgaccattcagcatatccattttctttgatacctgcgaaagcgaaacataaccactataagaaacggtcggtttaccagtctgcccacgtttggtcgtcaccatgatgacaccattcgctccgcgggaaccgtaaatagaggtagaagaagcatctttcaatacttcgatagaagtaatgtcattcgggtctatcaaagaaaggtcaccaccgagaacaccatcaatcacaaccaacggagcattttcgcctttcaaggagttaccgccacgaataataatgttaggcgattcacctggtgcagccacactattctgtaccatcacaccggccatctgtccttgcaaagcctgatcggtacgtgatatggacaattttgtcagatcatcgcctttcacagaagaaagagctccggtcacgtcacttttcttttgtacgccataaccgaccactaccacttcgtctaatgcttcggaatcttctttcagaataatgttcagaggagcattgccttttacttttacttcctgcgattcaaatccaatgtaagagataaccaatgtacaaccggcaggagcttcaaaagaaaagtttccgtctatatcggtgacggcaccgattgtcgtaccttttacaaggacattaacccctaacagaggttcaccattcgagtcttttaccacccctttcacaacagatgactgcaagacttcattcacgatagccgaactttctgcattcgccctgccaggcagagcagccgaagtcaggcacaatgtcatgcacagagcacaacctttcatgtacgtgtaattcataatattgttattaagattgaaactttttgtgtttttctttagttgcaaatgtatgagatggcggtttcgatctatttaaaatttatctcttttactttaaattcttatctaattgatggattgatttgaaagacaaacgcttatgaaagttttgaaaagtctaaggtaacgatttggagattgtgctaatttcagtattttacaacctcatacttatgaggaactcttctatggacaaagatagacattttttagattagggaaaaaatttgaaggaaaaaataaaaaaaaagtttgggaaaggattggaaaaattcaagagagaggttgaggaattaagtgtatgtgtatgggggggattgtataatcaatttgcagttaccgaaaaaggcatattcagaattcctgtatattgcttctactagtgattgcagaaccgacaattatatttaaaattacccaaatcaagtattccgagtggggcataaagattatttaaattgtaaccataccctatatattcaaactggcttcattcaaaggaaagtcaaaagatgttcataataatgctccttacattattatgacagacaagagtcatgacattggtaataaccgtcttttgtaaatcgtcatttatatgcagtgacaatttcatttccatgtctacgaaatttggtaataacatcttttaaaagtgtctagaattcctatcagttatgtacatatctgaattctgattttatgcgtatttattcataaaattagactctatatctgcttacacaggttatcactatactatttcctgcaaataacatttgggaatatatttcgtaacccaatggtttcaaagatgtttcctgtcagctcagagggaaaccgatccgctccaattgtactattcgctcatctgacatgtttcccttgcggtaatcccgtctttggatggtacaccaacgtcccaatgctccttcacggcaacctggccatcgcccttggcggttatggaacaggcgcaactgctcaaagttgccttgccagacttgttccgctgaccaaacaaatcctattttatccaacagaagccagcgatcatgggataatttccccagtttgtgcatttttcgttgtgtatgacaccatccacccagattcccctccgtcgatttagggaaacgctgatattttccgacaaaagacttcaactcctcgtaattcttcatccattccctttgaaggtcttgattccaaacaaagccgatctcatccaaagcccggatgcgctctttgctcaagcgtccattcttccgcctttcccgttgggtataacaccaagttgcaagcgggccgtcttcacgtttgggccagcgtccgcaggtatcaaagaagactttcaacgcacggtattctttcatccatttggagtcgaactggttccattcgaagccgatcaattctagctgacggcggcgttcctcctgcaattttccccgtttataggcaatgcgttgggtgttgcaccacaaaccgagtttcccttccgtaattgatggccagtcgttttcttcccgacggaattcaatcagcctctcatacataatctgccagggctccagttctgccaatatctcttctatgcgcagccgtatgtctgataggaaacccgtcgtcaaaaaagaggtgtttccttcgaatcctttgggtgacggaaggagagatagacgctccaagtggggagccatcacatcataaaccgattttcctaaaagattgttgacaaaatccaagacgaccggccgttttccagcctcggcatttagacaacggcccaattgctgcaaggtaacgatatatgattctgtccgtctaaggaataagacagcatccacaccttccacatgcagtccttctatcagcatgttgacggaaaacaatacgtgcagccggtctgattcttctcggaaagcatccagtatccggccgttctgccgttcaccttgggcatgatggatctcgaacggagtaatggcacgtcccgctcgcgtgagccatccgcatacttctggcaccatctgcttcaaatcggtgagatcgcgacagaataccagcagcttgcgtacgcttgtcggcaggaacttccggatgacttccggtgcccccaaagcctctttgaaatccacacgtgccagatccagtttcttctgtaccttttcttttcgtccttttgaacaaccactgcgttccagctttctttgcagccggtccagttcgttgtccagcccgtaagcactctgtaccagaaccggaaccggtaagatattgtaataccaagcctgcggcaaggtaagctcataaaacaaatttccttcgaaataaagatccaccgtatcgatcattccctccggacggatcggcgttgccgacgttcccaggacataggcacagggattattttctatcacatcctgcaaggcacttccccaaatttccgccccgaaatggtggaattcatcaataagaatatgatctgcccgtaacaacccattgtcctcccggttacggatcagtgactggaatgtccggtacgtcacttgcggaatagagaatccgacggctttccggatctcatccagaatcgtgatgttcggagcaaagaccaatatcttttcctttgcatgatctgcgatatagcgtgccagcaaataggatttccctgttccggtagcctgcacgaccgcaccgatacggtgttgtttgaatccccgcatgatcgccctgtaagccgcttcgttatgcggataaagctccacatgtcttccggacaagaggctttcaatatagctttcatccgaaacggtcagcccatgcagttcaaagtccaatgcttccggcaggaatccgccgtgtgccacgatcctgaaatatagatttcgatgccctttacttagtgtagagaacttctcgtagaacaattcagcatccgagcgagtcaaaggacgttcgtttcggacctccttcacgatggcatgtaccattcccggcttgaagcctatccgtagtccctcttcggattctgttacctggaagcctagacggagatagcaatctgttaaagacgataccatcctatttacttacaagtcaaaaagttcatttgattattgtcctttgctgtttaaagagggctatcatatcacccattgtcagtcgaccggtaatatcttctgttataatccggttcaaaagccgaagatccgcctcaatttggacacggaaacgacaggactcaggataatcatcccggattgtccttgctgtttcatcccaggaagaagctgacaagtgaagacgggaagaaaactccatacgccggttgtgccctttgtagatacggtaataaattgtaccacgctcgggatttttcttattaggttcaaaacggacaacaacagtaggcatccttgttacttttacagctgatttatatagaggagtttcccttataatcaaaatttgggtagggtgattttttcttaaaaacgctcaccaatctgagtattttccctgcattatttatatccgcactggaaatatggataaattcactcatactagtatatgctacccagaaataggagaaagtccaaacaataaaagttcccaaaaggaacacccatacgcaggaattttttcatttaccattccccttttcttcacactaaaatccagaatcatattgcagacggttgcggtcaaaatgcctctcatgcccgttctcttccgaagttagtggtgacaacatatagtaatccttgaatgttatacacccgtttgaaattagaaaccggacgaatctgcatcttcctcgttttccgcttataaagcagaatcatcatcaccttaaaaaatattaatagtctgattttcaggtttaatctcacatctttttatattctgtacagcaatgcgttcacaatacgtccacaagcaagcccgtctccataagggttcactgccttgctcattttttcataggcgactttatcgtcaatcaaaacagatacttcatttactattctgttataatccgtacctaccagttttaccgttcctgcatccaatgcttccggacgttccgttgtgtcgcgcatcaccaataccggcttacccagtcctggagcttcctcttgtatgccaccgctatcggttaatactatagtggatttttccattaaatagacaaaactcagatattctaaaggttcaatgaagaacatgttcccaaaatcggataattcctctccaaatacgtcatgtatcggtttgcgcacatttggattcaagtgcatcggataaacgaagtccacctccgggtatttttttgtcaagtctttgatagcagtacacatatggatgaatccgtcaccgaagttttcacgacgatgtcccgtaatcagcaccagcttcttaccaccattcaaacggctcacgtcatatccggcttttgccagtatccctaccaattcacaatccaacgccttgtcgctcttaattttatccactacccaataaagcgcatcaattaccgtattcccggtcacgatgacattccgatcgtcaataccttcccgcatcagattgctacgactcagtggcgtaggcgagaaatggtaggtcgccagtcgtccggtcaaaagtcgattcatctcctccggccatgggctatagatgttatgtgtacgtaatcctgcctctatgtgtgctaccggaatctgttggtagaaggccgacagagcagcggcagtagaagtggtcgtgtcaccgtgcaccagcactacatccggccttgcctctttcagtacatcacgcatacctgtcaatacacgggacgtcacgtcatataagtcttgtccctgcttcataatgttcaagtcataatctggacaaatatcgaatatatccaatacctggtccagcatttcccggtgttgtccggtcacacatactacagtttccacccgttctggctgtttctggaattctttcaccagcggagccatcttgattgcctccggacgggtgccgaagaccaacattactttcttcattgaattatatttttacatcagattgattttataaaatcgtaacagcgatatatctgtttgttaaaatcgaattcattttttgccatatccaggcagttcttcgatattgtgctgtattcttcgtcaggaaggttaatcaactcaataatattattgtgtaattgtttgaaatcatgtggctttgaaaccattccaaaataatatttcgatacgatctcagccccttctccacctccacaaaacagtataggtatgccaataggtatgagatcatatattttggatggcactgctcctttgattgctacggtaagtggaacaattgacgcatcgtatcttgacaactcttcggcaatttgttctttctttacatatccatgataatacacgaaacaaccgggatgtttatttatatattcttttatcttttctgcctgatttccaccaccatacaagtggaactcagcgccaatagactgaaacggaatattctcgataattgaatatatatcttgtgccacacctaatagtccggcatatacaatgcgaaagggcgtgtgcttccttttgggttgagcagcaaccgcatattgctgcaaattacggtatacaaacttgttttttgtcgaaggaaattgattcacatgccggattatctcttcagactgaccgaaaataccgtctgcattgcgataaatataacgttcaatccacgcgaaaatatcatatatcttcccaccttcacgcattgctccaagctcaacagcagaaagtggccataaatcggatatgttcacaagagtcttgcgcccgaatatttttttgaaaagcgtgatggccgaaccagccactggcagtggagggctttggatgatcaccctatcgtaaccctggatcttctttatcttaaaagcaaacaaccataacatggtcgcaaatgacatcatacttaccgctcgcttaaaaggattcttggacacggttgcataagtccaatatctatacacgtttatgccattaatcttttctttttttgacaaacggcctctataaccctcgaatatttgtccttgagggtaattcggcaaacaagttaacacatccacttccgctccctgacttttcagcccttcagccatattggttatacgggaaggagcagccccaagctcgggagaatagtagaacgacacaattaaaatcttcatattttatgcctgaaatatttgatacgttaaatttctgcaaaatactatttttatcgtcttagaaggttctaggcgattgtattctactgatacaaaatcgtttataatttctatggaatttgcaccagatacagcgatattagccctgttggttcttatttcagttgacgatatggcaaggacctcaatatcgggtgcgaaatgaatatagctgatacattctgtcatattattgccgacaatcttatcatttattgtaaacacatcatcgttaatagtgaatttccgttgatgtatacatcctttaaaaccatcgtgctctgccataatttcattttcggtatcggatagtactcttactttagctcttttacccatacggaaacctccccacacctcgctagaatccttgttgccgacagttacggtgttatgagctgacgtacttcgttcgtactgccttcttgcagtcttgttgtaggtagaaatacctgtatcaacaacaaacggtctgcaatcaattcgcaattcataattaaacgtatcggcatgactatgccccggctgataggtcgcagtaatattacccacatccacaactgcctctaaatgtgttgaacaaagcttcctatagccacattctttcataggcaaaggggtccattccaacttcaatcttttggcgtatgctctcaattcggaaactgtcggtgctatcccatatgccgaatcattaagtaagggaatcgtatcgtctttccacacgatgctctccaaatgccccaacatccttaccacatacagtttcaaaagctcacacattttctcatgacccctattaatcgaggcattatagcaatccaataacctatcgagcaaaatgcagtgatacatcggtgattgctcgtaatgtgagccatcaggcaaaatctgttcatcaagctctttatacaacagacaggatgccttgtcatacatttttttatcggaaaaataaattgaagcgataaacaaagcgtaagcatcttctaaaagatggttgccaagcagttggtattccagtttccgttcgagcaatttacattgcgcataaagggaatcgttccaccgttgcaaccgattgctctccacttttttatgatgcctgccgataaacttgatccagttgatgcttcgcagtgcgataggataaggatcaagaccgatcctgtttgttggcaaatcagttataaaccgttcaacccattctgaaccttgttcaaaagtcatgtcaggttgcaacaaccaatccatataattcagattgtatgcccaaagcatcccatgactaacatcattccatgacttaaaatcccctataagatttaggaatgtaaatgtcttgggtacattgtaacaataccactttgcgataactgagaccatccgcaatgaagattgccggggaacattatattccatcaacttatgagaaaatagtctataatataattgataatagatttgttttaaccgaagatgtttaattgtattgacaataagaatattattagccatttgatttagtgcattataatttcaagtatgcgtttattcgtcttatcagattcaaactcttcttcaaatttcttcaaggcattctctgaatattgagaatagtttgttgcgttaatcgataagatagcttgttttatcgcatctacatcaccgggaattactaaacgaccattgtaaccgtcttctacgatttcaggtattccacctgcataggttgatacgcaaggaatgcctacagacatagcttcgatgataatgcccgggtagccctcgcgataagaaggtaatagcagtaaatcatattctactaaagtttttaaaacctgttcggaagagacaaccccatggtatgttattccgctttcgttgaagttgatattgcgatatttatcctcttttatctcaccatatatatcaagggtataattcgaaggtaaaagtttggataccgctataagatcttctatccctttttctttgttgatatgcgacatgaaaacacatctgccacgaaagtctgaggggttctttcgtattgttgaagctttacgcacattagggaaccaatgtatattgtcactctttcctattaactgttgtaggtgcgtaataccctgttgggtttcaaagaatatcaagtctgtttgtctgatagcatcaagtgcccgttgtaattgggtttgaccaattttctttatgtagaactcaaatgaacctccgaatttacgtagtacgacttttttgtgtgccaaacgagctattttactcaataatgggaaataataaattgtaccatgatcagaaaaattgaacattacaatatcgcacccaaacagtctccacaaaaatgccggaaaaaagtatgaataattgcgccacatactacgctggcgagtgcgaagatttgaataccggttgttttgtacaaacctatattcatattcagactgagaggcaagatagtcaagatagtttttcatcaacaccgtcgcacctccataattcaataagttattctcatcgggaattgagcctacaacgagtaattttttccgtttcattacgctttaaatttagattacataatgaaactaagcggctgatcgcccgtttatgtatgaaattttaccccccccgtatggtatctgaactatttcagaaattttacttttcaacatatgttcttccttttttactatttcaagtattgtattcgtatggatttgcttgttttgaattaacgtttgtacattttgctctatatcctcagctgtgggtctgtcttcccaaaatttatacggcatattaaaacagctcatcattcccgggtttttaagtccccattgcttgtaaaacaagcccaagcaaggtgtcccgaccgatagtgcaaggataatggaatgtaaacgcatacctaagagtaaatccacatttctgtatacctctatcagttcaagcacattatgggattttatcaactttactccatgctttattgcaaacgcttgtgacgtttcataatctttctctgtctgtacaaccactattacattatgcgttacacccagtttatctactactttaccgagttcgtcaagacaatatgctatctcactatcaggaagatgagtgatatcacccaccgtatgaaaacgtaatgttatagcaatattcggcttatcacaattaatagagagtatagactttgctttttgcttgttgataaaaaacgccaagtcgatagtctgaaagaaattgccagctggcataaagtgttcgagattcttatatgaaagtttctctctaaacatcacaacctgcgccttacgtagtatgggaaataataataatttacctatcttattgagagtagatgctgattgcggaaatatgattacttttttaccattcttctgtgcgacctgtaatggatacatcaatgccaataagcgagtaaaatcaataatagaattacacctgaacaaatttccaccattaaaaataatcatgtcgctatcaagtaattgtcggcgaaaccctcttttacgtattattcccattatggtaaaaagaccttccgtatagtttttcagtgtttttatcatgctatcggttctgtcaagcgtaaaaggagattcaaaaacctctatgtgattgccataacgctggttaagagtttctaaagcttggtgataatccaaattacttcgggagtatcgagaaaaaagttttacttttattccaaacgagagtagcacgtctatcgctccaagtgttatagcaaaatcaccggcattacgtgctgaataaccagatacaagactaacagttttaacaggattcatatatatcatgatattttgctgcgactttacgtggattatatatttcttcataagtagcaagagcttgtttacctattgatttgcggagaacttcattctgatatatttcttccattcgatcagccattccctccaaatccgctaatgaattggtatacccgtttcgtccatcatctatcaaatccaccatttgagggatatctgaggagaataacaccttacccaatgcaaatgtctctaccataagatttggcaacgcttcgctgtatgtagtaaaggttgtagtagtacaagccgcattgtatagggtgggattgttgacatatccttcaaaatgtatacgatttcttactccttctgccttagccaactggtcaagccgctcataatatgattgttcatagccacctacgagaatacaccctaatttaactcctctgcgatttaaaatccccactaatcgaatcgtatcctcaatgtttttgcttggaacaatacgtccgacaaagcaagtaagcaaatttgtaccaacctttgtttccaattcttttcttttggctactgtttcattctcactatgtttatccacaaaaatcacattagggactatgatatgtttcattggacgaaatcccacattttcaaagtaatgttttttttgatatcgggtaagaaaagtagtaaaatcaacatgctttgcaatatacggtgtaatcacttttagcatggatctaaaacgcatattcattgttacacgatgtacagtacagacaattttgaagttaagaccatagaactgtctttgcatcaccaacactaaagctgagtaaagtcctaaacaatgtactacatcaggatgatatgactttaagaattgttttaacgctttccaataagccatactcattgggttcaaggtgtccacttcgatgagctcaacgtctttatcttttattgtaccgcgatttactccaaacaccatggcatcttcttcataatattgtttcattgcctttacaagatttatggcggctctgacaccaccacctatcaccttgcgtggctctactatatatgctattttcatttctttattcctttctcgaaaagttttacatagttgcgagcacattcgtacatactgaatggaccataagtggcaagagcttttagcttcatgtctttaagctgtacatcggtgagggatagaaatctctttaccgttttgtaataagattcttcaccgataccgtcactcagaaaaccgttttcaccgttgtgtaccacatctactataccgcccacaggtgtgcataccggtatacagccaacaccaatagcctctatcaacgaaataggcatcccctcatacgaggaacaaagtgcataagcatctcccattttaaggtattcaagcggattgtgcagttctccaagtaattgtattgcttcatcgttgtacgaacgcaattccgcggtcatctgtgcatcacgttcacctccgataaacaatacagtgaggtcgtatccttcccgttttaaccgcattaccacacgtgccaagagagtttgtcgtttcacagggtcgatacgtgcgagacttatcagtactcgcgtcttatttgtatgtctatactgtttaaattgttccttgacctcgtctgaaacaagcatgccagcatccacattgcgcccattgaaaatcataggagcatccattccataatattttcggaagctatgtagcgattcggcggaaatggtaatgggggtaatccacccacgatgaaaacagaacttccgcattccgctgctgataaaggagcctccggcttctttatcagcagcggaatgcactgtatgacagtgcataacgccattctttcgcatgattgcgaaagcaatatacataatagcacgcaaatgcgtgtgcaccacatcaggcttttctctacggatatatctatatactctaaataacaaaccgatgtcaagtcccatccgtttgttcatcgataccacccttacattattcgatacctctttcaaatagaaatccaccttgtcaagtgagtgcaaaaccatcaatgtcacatcatgttctttcgacagctcattgcacaagtcaaccacaaaccgctctccgccgccactgctaagttgaggaattatttctaagattttcattcagattgttttttaatttttttattgtgatcctaatacgtgtaaactaacgaaacatgtcagaaaaagacgtacccttcccataccaacctcttatagaaggcatagaaaagtttataacagataggaaggattgccaaaagcatcaagattcttttctcgcgtgtcatcttgaaattagaataataataccccacaacaatacaaagaggaaaatagctcatcattatgaaacgtataaagagccataccgaagtttcttggaagaaaaacagactggcaacataagttattgcataccaatagatgaacaatgcctttatataccgtggaacatcaatttcttcaaaaactatcttcttagtcataagagccaaagatgcgtataccggcatataggttatcatttggttcagtttaccaaaaatattcgactgccgcattgtgccgctcgcatatcccgtcatcgagctccctatattcatgtctgctatatcaaaaccgatgagtccgttcataataatataatccagcagtaaagtagtcacaacggtcaggaaagggaatatgacaagactgatttttaccgttttcctattcagataaaaaggtgttaccgaaagtgcagcaatcgaaaacaacatacttttgtgaaagaagaatgaacagaaaatcaacaaacaaccgaataggaatgacaataacctattatgagagggcctgataatgaatgaaaagccaaaaaacagtatggcaattcccaaatttccgcgcattactgaaataatgttgatataaaacagcacaaatatcagcaatcctatcctcacatcaagtttgagccgttttattgtccataacgacaaaatcaccgttccgctccacactataaaccgccataccagatagtttgaagtgacattccgtatcaaccaatagtaaacgggttcaagatgcacgtttaatccggttgaacagatacgtttgaaaagcccctcgtagtgatagaaatcgttgtccgcatagccgaaagtgcaaaacagtatcagcaggataccgtatactgcataatccaagatgtctgtatatcgttttctaaattcacagccatatctatacacattcggaaacggatacagcataagaaaaaacagaagtatattgaacagtaccggaactgcctcgtaatgatatttcatcgttgtaatttattaggtaaataaaataggacacattcatactaacacagaaatttggtgtatttgcatccggctataatcacacttgatacatagcagacgatgaaagtgcccacgaaggcgaccaacggagttaactctttggtatacaaaaatacccccccccattctataatagataagtctcagaactatttcttgcatcacatatattcccatcgaattcattgcgatacttcggcatacagtgtatagttttccattgcatctgtcttccagttttataaatacagcgacatagataattgtgactaatccatagcttaccattttaagagtatggtggacaaacaggattaaaacttttactttcaagtccgatgccagttccggacgcatcccgtccattcccaaaaccaatgttaccgcaaagaataaccccatataaacagccgataaaatgcatattgttgaccaattgacagttctcagccgctcacgatttctaaagaaaattccaccaagatggaaaaaaagcagataataaagcgattgattaaaacggaacggaattcccggccaaggcagaatagcaataatcatgagtactaacatcaagttacgtcccttgagacagtgctgtatgccatattccattaaaaagcaccaaaagagcatcggaagaaaccaaagatgtccgtatcccccaataattttccaaaaatgttccagattaagaagttttgacggaccaaagaatatcaatgtcatgataatgccccaacacatacacggcacaaacagccgtttcagcttaccggctagtaataatcggaaagaaatgactttcttttggagcgaaaaggcgaatacatacccggaaatcaggacaaaagtctccagcatcccactgtatgccagttttcctccccagtaaaatccttcattgggttgggcataggaaggcatatcccaaccaccgcaatagggcgcaagagcatgatagagcacgagcagaatgattacgaacgtcctgataatatctatttccttaagtctttccatatatttttaatgtatttgaatatgggatatacaccaagcaaagaaccgaaatactcgattttactgagagtacgcatcctgctgtgacgaatgactgtaatactgttgatttccggatatgtattgtgccaaatccgacggattcgcggcatcagcatatatctatcaagatacattcttgaaccaactttcagcgcatttatctcgtctgtatacttttcataaatacctttggagcgaagaaaggtgaaaatcagatcaagattctccttacgctgattgagtttattaatctggatctcagcactgccataacttgtaattgacgcaggattaaaaaaatagtaataaaatggtttcatcaagtatcctacattccggctattccaaaccaattggattatcgtcgccagatcctcgttcatattttgccttggaaatgttatcccatcgtaaagactacgtttgatcaaagcaccacacaagctccccatcaaccgcccgcaaagcaatgatgacatcaggaagtctttattattggtagaaaccttgcgcggggcggaagcatatgtagaaacaccatcgctacgatagaaatcataaaagaccatatcgtaatggccggatagggcaaaagcatatagttcctttatggcatgcacatccatccagtcatcgctatcgcaatgaaccgtgtaatcaccagaggccaattgaatcccttgtcgtcgaacagtgggcaggccgctgttcgacgacaacctctcaattcgtgtcagcctctttcgatgcggatatttttccagagttctctgcaagatctccaccgacttgtctggagaacaatcatccacaaagatgtattcaatgtcatcaaacgtttgggcgaacaacgattcagcgcaccgctcaatatattcctctactctataaatcggtacaatgattgatactttcggattatccatgatttttagctgtcagtttttttaattgttctattccaagggcaattaaataactcaatgttatgaagataacaaaagtgattaagtttgaaattacccccccagttttgtgtcataaaagctactgtttgttctgataaaatccctgaacaaccacagaaaaggagcgtgtatagccattatcgtgagtgaattagctcccaaagatgccaatattctgtttgtagttgttatcttgttgaaaggcttgaaattcaacaaaagatatatggcacagaaagctccggcatagaatataaacgggaaactggaaaatttcagttgcgaaatatcaaattgataatgtgccaaacggcagaacgctatggctatgatatatccggctatagcaataacggttgcttttttaattgccccctctgcttgtgtcagccctttgtcgttcatccatttgccgacagcatagaatggcaaagagaacagcccctgcccgatataaaacggcaaattgatcttggaatatgcgacagccagcccaattacaaaagaaacgataagaataacgttttgtttcttaacggttttgtccaaaaaataatatatgacacatatataaaaaagagcgaccaagaaccacaacggaccatcaaatgcggcgatatgatggatgctcagtttatcaagcggtattccctgcaaccccatgctaaaataaaatacagcgaatatcagagaatattccccaaagggaataagcaaccgttttgctcttgattgaataaatccttgtttgggatgataaaacataccggccaaaaagaaaaacaaaggcatatggaaaatgcaaatttcctttataaggattgcggtggcatgtccccaaacgacaaggagtatgccgatgcctttaagtatgtctatacgaatgtccctttccattatttcaaaagtttaagttcctcttcctttcttctgcaagaaatacatccgcacacttataatctgcccaaagaacttctttgtatttttcctctttatctgtttcactgatagtacgtttctgcaaaccgatattatcgagaaaagtaatcatgcagttgtccttatctccattgacagcaaagaacggcatatgaaaaaacgagcgcatgaaacgaaccgctggtaacaaacattgcaatttgaccaaattaaggaattccaaaagccccgtaacgagctgctgtttaaaaggatacaaatcgcaacggagtgtattgtatactgttgccaccacctttattccctacattttattgtttttttaagaacatgaatttatttgttaccgtactgattacgaaccctctttctttagcatcaagcccgaatttatagataacaagtccggaaatgataaggctggtcaatacgacaagtatatggctaccccaacttgaggttagaaatttatgcaaaaagaatgggaccggaatgatgcagaccgacacccaaagacacctaaacatcacttccacgacatacctcctaaccgggaaattcactttgtgtttgagatagaatattctgtaacagtgagtaatgaaattgatggcaattctgacaatcaccgcatagacgggactgcaaccgaacttgaacaatacatatataatcggaatattcataattatcatcgaagaaacggtaaactgatacttggctatattgcctattgtttcagatgacacccaaagacttccggataatgcatcaataagcaggaagatgagataaagctgaatgaactgtactgtatattgagggacacagacaagccataactcgacgacaggccgacaaatcaaaatcaacggataagcgacgaaaaagagcaggaaatacgacaattttgacgagcggaaaacaagttccagaaatctggatttatcccctgaaaaataggactggacaatctgtggctgcaccgctttctgaaagtttgtaaccaaagtattgacagcactgaacacttgcgaggctacccccattgccgcattgacagcaaccgtgaaaaaaatattcaaaagtattgatatgccttgtatggatgcgacatgggctataccgccgaaaaggctccatgaagaaaagaaaagcatttctttcagcagctttatgtcaaaatagaaccggaatctgcaagtcgtgaaattacgcttgcaataaatggcataaatgatattcaacaatatcccaacggtcataagggcaacggcgtacaacaccagacgattgtcttcagcccagaaaaggagaaatactgttcccaattttgccattacctcaatgatgctgacataagcgaaaaaagacatcctctcatatgcaataatgctcgactcatcaggaatcctgataaaatgaagacaagcggtcactacagaaatatggtacacaatccgtgctgcatcttgtgtttccggaggaatattcaattttgtttcaaagaagtagagccccactgtttccaatacgaagccgataaataccgctattgcaaaatgtatcagaagactcatggaataaaccctcgaaactctgtcatgattgccttttcccaattccacgttcagaaaacgttgggtggcctttgtcattgcggaattaataaaagacagaagtgcgataaagccgccaacaacattgtatactccaaaatcgttctctcccaacacttccaatataatcctggaagtatatagagatacgggcatcattacgaatgtccgtatataaagcattaacgtgttgcgtgctatgcgtttgtttgatgactgcatttataactatcctacattttttaatctcaattgcaacctgaatgacaatagagtgtcagcggcaaatcaattggtctgatggtatatcgaagctaacttttccacaccgtctgcaagcgtgaaccgactggatattacttttgattttctacccatcatttctcggacttcacgattattgacaagtatctcaatcctgtcagcaagctcttcaacattctctttttcaaaaagatatccgttttctccctcatgtacgatttcaggaatgcccccaactcgtgtaccaataacaggcaacgaatagtttagggcctccataatactaagagaaagtccttctgtacgggaaggctgcaagtaaatatcagaaatattcaaaatatcattaatgtcatttcgtattcccaaagacataatctttctattcaatccggcctcggcaatcaattgcctcaagctattactgtcttcagaattttcgctaattccgataacaagcactattatatcgtttttaagtctgttggagtccatcagactctgaatacttttgacaagtatatcgaatcccttgatacgaatattgaatccgattgtagtcaacacgactaccccctttggtatgtccaatgtttttttcagatttgggttgacaatcttttttttccggactcccaagtataggacttcactctttgaagaaaaacctacgccttcaatcatttctttctttacgccacaactgacacaaaggaatctttcaaaaggaaaaaaacagaacttcagatataattttttaagtttgttggaaacaaagatttcactatgacgggttgaaataatccgaatccggggaaacagaattcgcaagaatggtgcaataagataacttccaaaatgaaaatgaacaatgtctattttctcacgtttgatgacacctatcacaaatttgaaatattgaaatgtggaaatgctttgtttacaaagcattacccccccacttattgatgtcatttacatagttttcactgattggcatcgactcgtatacaaaaataaatttatcaacacggcatatcttgaccaattcagcgaagtaggattctactccgccgtatttagtcgatttcatacctgtcagttctaaaatattcatatattcactattttttgaatattccacaaaagtccaatatcaccttatcctctcgccattctaattctttgaacggagtgtgtgctgtaaggaataccacgatgtccgccttgtcgtaggcttctttgtaatctgttaacttgaacacatggtgctcctttacattgggttccacaaccaggatattggcattattgcaactctgcatcactttcgtggtaatatattttgcaggactctcacgcaaatcgtcgatattcggtttgaaagccaaccccatcatggcaacgcaaggtttccgatgatgtttcagttcaaattccagcatggcatttttcactttttctgcgcaccaaaaactcttatagttgttaatttcacgggcatcggcaatcaatttactctctgctggaaaatcagcagtgataaaataagggtcaatagctatacaatgacctcccacgccacaaccaggctgcaagatgctaacccgcggatgtttgttggcaagattgataagttcccacacattgataccggccttgtcacaaatcaaggaaagttcattcgcaaaggctatttgtacatcccgactggaattctccgtcagtttgcacatttcagcagtacgacagttggttctatgaagtgttccctgcacgaattgagaataaaatccaatggccttatcggtagattcaggatttaaaccgcctatgacccggtcgttatgtatcagttcgtaaatcacattgcccggcaatacacgttcgggacaataagccacataaatcctatcttccaattcaggacgttcactgaaaatgaggcgggccatcgcttcggtggtgcctacgggtgaagtggactcgatgacataaaggtcgccttcctttaataatggcaatacggcacgtgtagcggcttccacataactaacgtccggttcatgatttcctttgaacggggtgggaactaccataaaataagcatcgctcacctccggctttatggaagctttcaacgagccggcattcaccacctcctgcaacatctcctccatacccggctcaatgatatgcagatgtcctgcattcgtcatatccactacctgggggttaatatcaactcctgtaatctgaatgccgtgcttggcggcgataacggctgtgggcaatccgatataccccaagcccataaaacaagctttcattatcaatctgttatataagttattaatcttttaaaatttctttccgagtacaattgaacagaatgtgttcaacagaattttaaagtcgaaccaccatgagcgatgtcctaaataataaaggtcatattccaaacgtcggagcatcttctccatcgtatccgtatagccgttatatagtgtggcatatgatgttacgcccggacggatttggtaaagataagtatatcgcttgtcgtgttcaagtatctggtcgatataaaactttcgctccggacgtggaccgatgaatgccatatcgccacgcagaacattgtagagttggggtaattcatccaaatggtgcgcccggatgaaacgaccggtcttagtcaatcgggaatcattttcacccccggtatgactaagctgcggtccgaacttctcggcatccagacgcatggagcggaatttgtatatgtagaacgggcgcccgaatctgccgatacgttcttgcttgaaaatgacacttcctccatcttccctgcgaatggcaatatagcaaaacaggaataacggagaaaaaatgatcaatgcaaccaatgacaggataaaatcaccgatacgctttacattgcgcgcaaatgcagacattccatcgggaatgaaactgtcccgtggcacatattggctgacatgtgtggtgacaattattgcatcatcattcgggtcgtcctttttcagcttatgcaaccacttctgataagcattaaaatttattgtatctgccatttttaactttatataggtctcagtttgtgaacctacctcaacagaaccttgcaacaatgaaacaagggattctccggatgtaaccgtacacggcatctgaagacagtctgagtaactacgaaaattcatgtagccttgttgtttatcaaaaagacgtaaaccgtatgcggaataaccgtatgcacaccatgcaccgatctgttcattccgatacaagtggatataagaaccatcattttgattttcgttttcccttataagatgaacattcataaaagtatattgtttataatttatcgtaagcacaaagcactatacatttgactaataatcaagaggtttcctgatcgcatctattctatttcacctaagacatacttgtggggcatgacgaagaagttccactcctcacacgaaggacaacagaatctttgatagaggaacaatcgtgattatcgtcaatgttattaatgcagcttcgtatccgaccactgtctggaccaaagccatagctgttatggcatgagccatagtgaaaccatgcataacaacattggatataaaaatatcagtgtcttttattctaagattaaagattacaccaaatcctgttgattgtacaagtcttgttgcaatttagtcaacggacgtagatgaatgtccgtttcattctccagaaaaccaaaaatgatacgtttctgaagggaaggagttatggtcatcccatcgtattgattttccatcatcttcatatagctcttatcccatgccttacgtttccagataatttcttccgccacatccttgaatgcggaatacagtggagtaatgtggaaacacttttcatgattttctctcaaaagattgtttccgggcgcgtcaaagcagatctccagggcttccgctgtattgctcttcaaatattcaagtacgactttgtcatgtggtatgctgaactgaaacggattcaatgtttcattgatatcgttggtgtatagattgaacaaactcggattttgttccttatgcttgttgcatgaactgcaacttggctgcaagttatagaaattcgtacacaggaaaggataaatcgattttggatagaaatgatccagctcaaaaaacgcttcataacggatactccgtttccctaccttccttgcagttgccgcatattgggcattgcaatacacacacgtgcggatgttgatcctgttcagataggggatgatttgggaagacacatcatcatagcgcatagcctcaactatccattcgtaaaaaagatgtgtttcgctctttttggggctctttcggtactgaatcctggttttcatcagcgactccgtctgcgcattcttgtccttctccgtttttcctttcacctgaagtatggtgttgaactcatggatgagcatgttcatctgtttcggttcagcgtggagcagatcagaatgtacggcaaggatacggtcaacgtatgccagcaaaactttgccttgggttgtatcttgcgtagacaatatattatcccgaaattttttcagcaggtccaacggctgctggaaatccgctcttcgattcttgaacacattggcggcataatcatctgctgccgcccgtaccttatcatcgacgtatatttttctcatgcagcatatcctccagcatttttcttatgatgggttcgccgattatccgatggataaaccgttccgtcttatccatattccaaccgtctttcacgagtttgtctgacttcagatagctcacgatgccctctattttctttttagcgaattcacccacaaatcccctgtccaaaaagaaactttgagccagtacgtcattcacgttcgccccgaaaggattcaccgtgatggcattttctccgtttatctgtcttccttcttccaaatacaggatattgcattgtggaatgtcactcaggatgaagggcgaatgggtgacaatcagtatatggaaagcacagtaccaggtcagtcccgtgacggacaagtattttatcaaagcatcaacaaatcgccgctgcatttccgggtgaaaacagagttcggcctcatccagcacgatgtttattttacggtaacgtaagcgggtcgttgatttgatggtgcggatattgttgatgtgataaaccattgtgcacagtgtatgcatgaactgcctctctccggaactcagatgatggaaatccacttccacaccgtttttatttttcaggacaatgtttgcgttaaacaggggcggaggcaaagtctggataatcctttccagatattgcgcttttccattcatcataaccgactgcctttcctgagatacttgtttccatatcaccgaggtaagcaatacataatcatctatggtaaagcgttcacactgtagcatttttcccaaatgagaatttctgttcaccagttccagacaacagagcagataacacgtctgtctgattttgaatgttatgtgtgacggatcggacaaaattaatttgactaaatccctgatactgctacagaccttctcaaaatcggcatcaccaatcggcttgacacaatttctcacacgacctatctcactgtatacctcataatcggcatattttgcagcaatggcgaatgtcttatagaccaggtagaggtacaattcagccgtcattccatttgcccggtctgtatcaaatccataggcacggacaatttgggaggcatagtgcataggatcttttaccgcatcacaaaacaagttcatgaactgttgccggtcggctgcccccgtgaattgcctgcatttgtctatcagtttaccatcattgcggctgaactcaatccttccggtagtatatcccggcataaactccttttgtcttttgcggttcttatagaatatcagaagagaaagggcgtaagtatctatcaactcatcaatatttcccatatctatagtcccgtggttgcgatagggattcagcacgatgggagtcatatagccgtcgttcttatgaaacatctcgtctatccaagtgcttttcatggctaatatcggttcattatcctgtaaccagagcgtgccgtctgacgtgtattcatccggcaggaacgcttgcatggaataattaatgacaatagtatagaacaaacagtgggacagtttgcccagttctttccgggtaaggctttcaagcggctcataaccggcaaactcgtcctcgttatccgctttgccacgtataggagggaacttgaacttttcctttccgtattcaaacgccactgtatctccatagttatggatgcagcaatacgtctttacatccgttttggggtctgtcaccacaaaatcaaggtcggcatacaggtcgggaacaaaacccaggtgcggttctgtgggtttatgtttcaaactacgtttcaggcagtaacccaaattattgaacatacggtatgtcaagtccaacaaagaacttttgccacttccattcttgccgacaatggcacttattgtcacccccgcagcaaagaaatccctttcaagcgacccgcactcatcaccatagccattgaactgatattgttcaccttgtttcaagatgcgcagtacgttcctgttccagcggtcatcctttcggattacaagtctcgtcaatgcaaaatttgcaatcattgatcactttgtttctgtaagattccaatgacttccgattttactgccgaagcgaccaatgtcttgtaacagcctatggcatggatgtcacaaccggtacggtcgtacattccggctttcagcagggcttcggccttttcctgcacatgttttccgtacattccggccaacgagggcaaattgagctggaaggagacatgctcgtccttcaaggcctgataatccctcttctgcatatattcataccgttccgaatgtgccagcaacgggtaataacctttcttttggatgcgttgcaggacagagagcagttccattggtggattgaaataggaggtttccaccaacaggtaacgtttcccctcctctaggggcagcaggtcatctttttccaaccgctcctcaaagagattgtccatcatgtattccgcagccaaggcaagttccagtgtgccgttataactccgtttcaattcttggaacttttcctgcaaggtcacagtttcattagggatgtcttccataatgtgcggcgtgagccacagctttctgactccctgcttttccatcatatctagaattcggagtgattcatccaatgttcccaccccgtcatccactcccggaaggagatggctgtgacagtcggtcattcctttcaggataccgctccgggcgaaggttattgtcttacgaaagggccacatgatagttgagtgtgaaaattaaaagttcttatgagaacgataacatgcaaaatcaatcacttgatgaccacccatttaccccccccatttttcctttatttccatagtaggaggagtagccgttgcgatagccatatctatagccatagcggcctccggcactttctgtaccgttcagtatcacgctgaggttcttgaaacgtttctcctggtaaatattttctagttcgggcagcatgctacgatccaataaaccgctgcggactacaaagacggtgcggtcagccagtttctcgatgatctgcgcatcggccacgatatcgataggcggacagtcaataaagatatagtcatactcgctgcgaagcacctctatcaaagtggccagcttgccgtcctccaacagttccgtcgggtttgggggaacagtaccgataggaatgatatgcaggttgtcgtatttttcatccttcacgataatctccttccagtcactgacacggttgcccagataatcacttaaaccagtcttcggggaatccacgtaggaggaggtggagccatgacgcaggtcaccgtctatcaccaatattctctttttcttgatggcaaagctcatggcaatgttcatggcaaggaacgacttgccactgccaggattaaacgaggtaagcatgaacacgttctgaccgctgtccttgcctgccataaagtcaatattggaacgtaacacgcggaacgcttcattgataatgttacggttgccttccttcaccacgatggctttcatgacagactgtgtgtgtttatcgaatcccaatttcttcttagcactaagatattgggggatctcaccgatgaacggaatgcttaggttttccagatcctttcgcccgcgcaccttggtattcatgttttccttcatgaaaataatcaccgccggaacaagcagaccgatggcgaatgccaccaaaaggatattcatctttcggggggctgtgggaagcatgctgcctctcggagcggtaatcacacgtgtattgtaggcggtgaaagcctgtgaaagctcgttctcctcacgtttctggagcagataaagatacagttcctccttcaccttctgctggcgttccacagaaagcagatatttcgcctggttcgggttggaagccagttggctggtggtcgtggcttcctgttggcggatgttgcgtatttgggtattgagcgaaacaatcaggttgtccaccgactgaatgatggtacgctgcatgctttgcagtgagttagccatgtcttttgccagagggttcttctcgctactgttggcgatcaggcggttacgttcgagcacgatcgtgttatattcaccgatctggctctcgatattgacattagcgataccggagttggtgggtaacagctggctgagtttcttgttgttcaactctttccggatatactgtgcggtggaaagctggctgttgagtgccagcaactccttcttgttctcggcggactgggacaggtagaggctggatgccgcctgcacatccggcagcaggtgctcactcttgtaaccggcgatgttctcatctacattgcccagctcgttttcgatcacgctcagacggtcaccgatgaactgcgaagtactgacggcgatctggttcttgtcctgaatccatttctcgttgtacatttcaatcagggtgttcagaatgtcttcagccttctgaatggaggcatcgttgatactcagattgataatggtggcatcctcgtttcccaattccgcatgcaaagcggctgtataataatcggtgacggcacacacattaccttttctataacgtatggaagtgcccacgaatgaatcattccaatattttgtgaaattgatgacaagtgtgcctatttcagtacggatggaatcgcccatctttccggagaaatcttccccaaacgctttcccgtttacttccatgtcggatatgacaaacgtttctttggatgaaatatctattgtaaaaccgacaggagtttcatccaagtggcgataggtgactgctaaaggcgaacttttgtataattccacatctttcagtcctttgcggacagtataggtctcgtttaatcccaaccgctgcaccacctcggtcatcagcgtgggcgatttcagggtgagcaactcattgttgatattggtattcgacttgaagatacccaagtcagaaaattcactgaccgcattggtggatgttcctcccttggaatcatctttcaccaaaatggcagcggtacgggtgtaaatgttcggggtgcccagcaggtacaaggcggctgtcgccagggttacgaacagggagagggcaaaccagtgccatcggggcatgaaaatcccccacaggtcttgtatgcgtatgaagtcgtcagcaggcttgctggcggttgttttcttttctgtcatattataaaaatataaagtgattccttttctgatggttacttgaatattagcacacccaacgaagtgaggaatgaagcgacgctgatccatagcgatacggacttcacgttattctcgttgatggtgctctgaccggcacgcatcttattgggctgcacataaatcacatcgttttgcttcaaatagtagaccggagatttaaaaatgtccttactacgaagatctacccagtgggtgacacgctcaccgttttcctcgcggatgacaaagatagcatcacgtttaccggtaatggtcaagtcgcccgccatgctgatggcttcaagcaaagtgatctggtctttggttatgttgtacttgccgggggtttttacctcacctaacacggagaaatagagattcatgaactctacggtcactaccggatctttcaccaagtcctcttccatcagccgtttcttgataagggcggcaatctggcttttggtcataccggcaatatgaagcgtaccaatgaccggaaagtctatgtttcccttgtcatcgagcgtgtaaccggatatttcaccattattgttgctactacgtaaatcggcagttcctgcccgatactggacacgtgtcaggttgaacaacgctgccaactgcgggtctttactggataccatgatggaaatttggtccttgggctgcacggtgatgtctcttgcacccacaatcgcttcaggctgattcacagcaatgtcttgaaagtaaagaatctccttcgaagtgtgacaggatgtaaacaacactatcgcaaagagataaatcaaaaatcgattcttcatatttatatctgtacagtttatattatttctaatttgtgatttcaattaatttttatcgtgatttttgcgaagtcccgtaaaagccagcagttttaggaaagaacttcaatcagatcggggtgcacctcagcggaaacggccatgacaccctccaataggacaaccaccctacggtttctcttgccctgcacccgcacaaacatgcccttcacgttatcgaacttgccaccgtggatacatacacgcattcctcttttcaagtctatctcttcgggcctataataaacagtgtcctcctcataatgagaagctatcttgatgaagctgtccatctggtcatccggtacggtaatatattccgcccccgtgctcttttcccacatggcgaattgcaagaaattgtatcgtttcttgaattcagtgatctgcgaatggctggcgtggacgaaaagcagactcggtataaccggcaccaacttttttgacttcactccatgataagttcttacggcataatgtttcgggataaaatattccaaaccatattccttgtctttcagcctgtcctctgccattttctcattcttgtaggcgcgcatgacgaaccatcggacctgccttttttcctccgctgtaaaaagactcgtactcatattccgaaacattttataggtgtggatataaacctagttcatgccaatctacatattggcatgtattacaatggattacgttccattttcccataatatccattgttagttccatacttttgacaaagtgtacagacctcatttccggggcttccgtcactacttctcttggcaagagaaatattagaggaccatattttatgtaattaattgatagacaagtagaaaagcgaagtggcattgtggcgtttatccaatatatgttaagcaaatacactctgtatgaatgttttggttatattttatcacctgttttctatcgtttcttcaatattttacataactttgcacattgtaatatttctcttgccaagaaaatgagccgtatgctcaacaatttttattatattacaaaatgctttcaaaaacctttcaaacgcatctggttttaaattgtcaataagaacatttccaacagtattctgccactgtattcatagatcttttccggtacttttctttttaagagaaataccggaaagggatagttctgataatcagatgctatatatggaacctgacaaggatttgtttgacaattaaaccggaatttgaaacattttctttcgaagaaaactgttttttatcatacaggtggatattttcctatattttacctatctttgcaatgtctaatatttctcttaaaaagagaagcaggatcggtatagccttttattcagtattctgcgtgtcgcatttgttcccgttataaagatttaagtatgatgtcatttgctttgtctacctgtgaggtgtccagtgaggcgaggtagattttggtcgtgttctccgaatcatgtcccatcgcctcgctgatggttgccagcgggacatttttgcttctggcaatactcgcccaggcatggcgcgctacatacatcgtgagcggcatgccgagcccgagccgtttcccaagttctttgagtttcccgttgatgaaatgcgctgtgctcctgtactgccgcacggcatccttagccgtatctttgatgaccggaaaaaggtaggggctgtcattatggccatacctgtccagtatctcctgcatgggtttctcccatttaatggacagacgccgtccggttttctgcctgcggtaggttagcacaccgctcttcagatcagcttttttcaggtaggcaatgtcaacgaacgacatgccacgggtataaaagctcagcatgaacatgtccctggcgtattccatgcccggagaaatgcgaaggtccagatcgcgtatcatgcggatcactttcaacggaacagcacgttttacggtcttgtctatcccggtgtagacatgtttgaaagggctgcgctgtatcgtcagttccttgtccaccgcacggttgtagacggcacgcaggttccgcatataataggaggtgctgttcggacatattcccttatccttcagccatgcctcgtattccagcatgagggtagaaccgatatcctccagcgggatgtcgccgtccctaccccaaaagcgcgtgaagctgttcagtacggtggtatacctttcagcggtgcgcttcttgccgacacgctccagttcctctactagcctctttccgaaggccatgaaattatagctgtcagcaggaggcgggttgtgaaaaaattccacaaccctgtcggcaggataggtaccaccggaccgttccagtccggcgatgatactttccagacggcgaacgtcttttttcatccgctcctttaacgcaagcagaaggcttcttctggcatcatcggataccgacagtatgatttccgatgcatgttcgtcccattccgacgggaaaatcttgtaaccggtgttgatctgacgtgccacccttccatgaataatctggaaataaagcgtcccttccctgccttccacggaagagggtctgaatttggttctgattgttgccattgtacagtcattttaaatttggattgtccagttgctttctgatttcctgtgcctccctgaatagccggtgcgccagactgtccttgtaggccgccatttcatgattacggatgcgattcctgaccgagtcctcaaaagcggtcaccagcttttccacacgccggatcttttcctcgtctcgctcgatggtaaaatgcttctcaaggaaggcgatgtctggatcatcccccggcagacagatcctgatggctcggtatttcaaatcggcatccttcaaaagccgattcttgcggtactggttgcagttggtccagacggaaatgattagtgccaaaaacagtgctgaagctgtcgttaccactgccttggatgcgctttccagacggtaggtcaccagtctgcgctccggttcctttctctgccggaccattttctcgtccagccgtttcattgcctcccatatgacctggctgtcctgtcgcaggcagtcccttgtcctttccatttccccggcaaacgtttcggcagacaacggcctaccttccgacaaacggacaatatggctatgtaccgttgcaatttctgagccgattttctccactgcggattgctggcgctccagacggattttcaattccgcaatcccttccggggaaatggtccggttttcaactatggggcttgtgccttccacgggcagtgcctccactttcttctcgatcctttcaaggcatccatagatgccttccaaataattttcctgtttcatctttcaaagttttttcgttatacatatggttcacaaactccttcctttcctgcgcttcttctttctccgcaggcgttccgcctctttctcgtcctccgtcggtgccaccgacggcatgaacacgccgcccgtaccggtgacttcgaccaggttatcaataatagaaccatgactttgttcatggtacggttgcttttgggaaacgtcattttccagggacgtgacatggttatggtccaatgccgcatccagtcttgaccaactgaaactgcggtcaatctcactccccttgaatgactggttatccttgataaagcggatgccctgcacttcattagtgtttcccttatacttgaattccatttccacgcccatttttaagagcttattttgaaattctttccatgtatttgcactcctcaaagcttccttaaccgcacgatatatctcgtatttcaccctttcggaagcgtgcagcttttccgttttaacggactgtttgccttcggaataggtgagcgaatacttgtccttgagcattttcgtcaccctctcgttgcgcttgaaatcgttgctgtcggaaatcaccttcccgtcgaagttcacccggttgaagacgatgtggcagtgcgggttgtccgtcccgtgatgcctcaccacgatgaactgcgtgttccgtatccccatcagctccaggtattcctccgccagccttgccatgaacgcgtcggtcagcctcggtgcgtcctccggcttgaagctgagcgcaatgtgccccaccggtttcgccacgtccggattcagcaggcattgccaccggaaactgcgtgctgtttcctccaccgttcccagcagcacgccttccgaggcgatgatttttgcgtcgtccttctgcgtcacgtagcgtatgcagccgctgaacgagcggcctttcctgatcttccctatcatgaggctatcctcctttcggcctgtaatcatccatgatccgcttcagctttcccagcagcccctctatcagcagccttgtcctgtaaaagcctgtctggtgtgagagctttgtcagctggttcaggttgttcgccattcccgccaggctgcgcagcagcgcgttttcttcaggcgtatgccttgccgtaacggtagccgccagtgccgcctccctgatatagaccgccaggctccggccggacttccctgccctgaacctgagagtttcgtagctgacgggggagaacttcactgtcactcccttggtcagcttccgcgtcctgcccagtgccggacgcccgcgtcttttcttcatcccattcacatcctttgtcatatgttttttctttttcgtccgtatttctttctttccgaaatctgcgaccggcgggagcggatttgccctctctgcaaccaccgggcgcggggagcaagggttttcgggaatccggaaacataaccttgctccccccacagaaaaatccccccccgcattttccacattgaagcgggtatacagggaacagtgcatacatcgggtatactccacgcccggtaacaggctgtcagatttttctccactgctcgatgtccccacggtaggcggcaagatgctccctggcaaggttctccagcagtccggaaacgctcatgccacgcccgccgagcctgcggacgacggcgtccagttcgtccctcacatcctcactgacgaacaccgtcttgcggttcctgatcttcgggacggtgaggtacgtttcccggtactcctccagcgaggccctgcgttgcctgccgctcgttcttcttctcacggggtcttccggttccggcggggtgtcctttcttctcgcctccccggatacctcctccgcaacgagcccggatggaatcatcgattccgtcacggaagcatccgtaccggcggattcccccggaccgggttccatcatgagtctttcccaccactcgtcgtggccggctccgggactacggccgttctttctgtctgcggtttcggataccgccattttcttccctttcgttttttcagtcggttcacttttcattgtacatggattttagatggttgatactgtgggcacggtctacccgtttgcccgattgtcggaagcaaataaaacgataataacaagtgctgtgaaacggacgggtccgattggcggggtttgccgtgttattcatattgttggatcagtctgacggtgatgacttcacaaatatacgcaccggaaatttcccactcttcgggaacggatctgaacgtctgtttactaaaagcaaatgaatattaaaatccgatttccatgacatctgatgacatataatgacatctgatgaaggggcggaaccatatccgggaacaatcatttactttgcagatgaaacaagtacgcatatggtgtcaaaggtagtcatcctgtcttgaaattcaggacgttccgccgggattcactaaattgcggaacggaatccggatccgaaaagagaatgaaacagatgtcaaacctgaaattacagtgattatggaaatagtgaacattgaggcaaggaccttcgaggcgatgctctcggccttccggacgtttgcggaccggctggacaccctctgccggctgtacggcgacatggaggagaagaaatggctggacaaccaggaggtgtgcctgctgctgaaggtcagcccgagaaccctgcagaccctccgtgacaacggcacgctggcatacacacagatctgccacaagacatattacaagcccggggacgtggaaagtatcatccggatagtggaggagcgccgcaagcgggctgaaagtatgggaaggtcgatctgaaaggccatgaaaaacgaatgtcgaacaaaaaaaagatcaagtcatgatgaataccgataaccgtctgctcacccgtgagagcagcgagcatataagagagttcttctccaccgtcgaacgtctctccgtttccatggagcgtctctttgccggcaggtcaccggcgatggcgggcgagaacttctatacggaccgcgaactggctgaaaagctgaaagtgagccgccgcagcctgcaacagtaccgtgacagcggtctgcttgccttcacccggctgggcggcaagatactgtaccgttcttccgacatcgagaagctgcttgacggctgctaccgggaggcgagaaccaggccggaggaactttagaaaagttccgtacgggatcgtgaatgaaggggcggtcggttgtcataccggtcgctccttcattttctttccaccggatgaacgactttaatttgctcgtaaaatacttatacacagagtgtttttttctttatgaattatgatccggtgacaacattggcataacatggcgggacatggaaacatttttccgatatggcaataagatacggggattccattataaaaaaagactcttattttattatgtcattatgttattctgaaattggggcgggccgttcgtgtaccggtgggacgatccgttcccgtaatggcggcacattccgtactggtatcattatcctccggcaatgccgtttcccggtcttttcggagtgaccttatgccggccggtgacaaccgcatgtccgtgtgtaaacatggcggcgcataaaaacaggcacatcctccgggcttttgtcccgtcggatgcgcctgtctccgtcatgtcatatacagccggactcctccggcccatgtctctatctgagtatcggattcgagagcagtatcttgtaataggccactccgccaatctctaccggcatcctcgccatcatgaactgcacgctcttcctctccaccttcgcctgccgcatgagcctctgcacgataaaccccgccgagaaccttgcgcatcttttgtccttccagacgatgaacccctcgctgtcgtcggcccggcagatataccagtcacccgtctcgtcgtcgtgggcgaagttcacccgtccgccgccgaggattcctaattcgattgacatcgtctttgacagatagacagtccccctgctgtcaaggttgatggtccgcttacccttgtatgtgacttcctgcggacgggagttttccctgttgtatactatcagtgccataattgtccttcttttatcggttgaactgtttttgtttttcaatacatgaagctttccaccgccagcatctgacttctccatgcgaaaccgctgtgggtacgtaccgcgtccactatcctgcatactttctgcgatatggccgatgccgagatacccatgcattccgccagcgccttgaacgagaactgcgcttcatagaacctgagcatgaacatccggtattcctcgtaggagaacttctgccttacgaaacgcagtatgtctcttaccagccgctcgcacccgttcaggtcgtcctcggaaaggaattttgcctcctcgccacatcggaggaagaaatcatcttcagggtgtgcataccggttctcccttttaatctttatcagggccgcctttttgtagcatccgatgaaatacgcgtcatagtccgttatgtcctttccgggaaccagcacctgccttcttacgaaaaggtaggtgtcatggaaattgtcctcgtccagcattccgtaccggcgtaacgtccctctcaacctgtcataggattttgtgaaccactcgttgaacagtctttccttttctgcgctcttgtctgccataaccttatatttttttgagttatacatggcctacacgggtaggcattcttatttcttgtgcttcctccagtttgtttttcggcggtctccggcaaggcttgccgtgaaaaaatacgctcacgcaaagcgtgaggaagattttttcacgagcaaccagcccgcagggccgccttgcgggaccggcctgaaaaacaactatttttgccgcaagaaatgaggatgacggattccttctgtctattgcctgtccggtgagaatctaaaataccatgcagcttttctgtcttcggcatacttggagaaatattcaaggatatggaatgagaacggcaatacgtgatattgcagaaggagcggaaatgggattggaaacaggaagcatgtccgggctttcatgcggtttatacggcagtgttgattttggggaggattacagggaagtgacaggaaggttagccgttccggagaaattgtatgtgtacgtttgttccttctggaatacggagtcttttaaaatcatggaagacctcattcgggaatgtgttccgaacaataccccgccacggaacggttatgacacttgatatcaggctgtaagccgttccgtagcttcagtatcccatatcccatgcatgaatgtggatcaggcggcatttcacctccttgccccgtttacggacatgccgatgcgttgcctgccggaattctcattcaagcagttttcgtccgccatcatcttccaacacacgcatttgctggatggctatccggttcagtctcacgagccgttcgccttgcggtatgccctggtctatgaatacggcgttcaggttttccatattggagaggcagatcagttcattgatggaggcatagtcacggatattgcccttcagaccgggattctgctcacgccacatcctggcggtcatcccgaacatggctacgttgagcacgtccgcctcttccgcatagatgacgccggcctgtgcgggggtgacttccaccggtatcaggttctgcctgatggcatcggtatgtatgcggtagttgatctttgacagttcccgtttcgcactccagccgagctgggcctgttcctcctctttcaaccgctggaactctttcagcaggtacagcttgaattgaggggatacccacgtggcgaactcgaacgcgatatccttgtgtgcgtaagtccctccatagcgtccggccttggcgatgatacctttggagttggtcttttccacccattgtttgacggaaaggatgaaacggttcaatccggcctcgtttttaattccctcgaattcgggggaattaaaatccggattgtacatctcctcccatatgcccagaaactcgacggtattcttgttacgcaaccacttttcaataagggcgggaccgttttccatattgcggaccatgtcggtcagggagatataatccttgtcattgtacgtgatgactgtcacttctgtattttggactttaattttagccatgttcttttaacggttattcggttattattggttcgatgtacaaatgtacggtgtattttccggaatggtcctccatatccggaaaagtttgtgtcacgccgcctgttgcgacaagccgtttctaccaaggaaagggcaggcaataccggctgacgtggatacaggcggaacaactcgcatatgcaatgcagagggagcaggagagccttcaccacagccggagaggaaagcggtctcatgccggggtacggcatgaaaaggggctcccggacagttcttttccttgtcgcacatgcactacgtcggtcgcagttttcgccttctgaatcccttttacgtccgtccctgcgctttcggagcgtttttccggtagaaaatttcaccatgcggaaattttctaccggaaaccgaagggaaaacgcggagtcccgcagggacggacgaactttgatgaggaaggggaaaatcgtccgtttcataaataccatttcctcatatggcatcgcatatttccttctccatcttttccagcttatgggacaggatttccatgtcgctgctgatcttctggttggttatccgggcatatatctgggtggttttcaaatccgtatgccccaaaagacggcttacggtctcgatgggcacaccgtgcgagagcagcacggtggtggcgttcgtatgccgggcaacatgataggtcagccttatcttgaaaccgcactgcctgccaagttccttcaatatggtgttgcatctgccgttgctcggtaccggaaatacatgatcgtccttggacagccccttgtacttctctatgatgcgcttgggaacgtccagcaggcggatgttggactcggtgtttgtcttgcgccggcgggtgatgatccagaggttgccgtcgaagaaggtctggagccggtcggtcgtcagcgccttcacgtccgcgtatgccagtccggtgaacaccgagaagatgaagaggtcacgtaccagctcgcaggtcccgcttttcaccggggcctccatcagcgtctgtatctcacgctccgtcaagtagccccggtcaacgctctcgaaggagttgatgtacccggcgaaggggttgaagggtagcgcgccgctgttgcgggcgatggagatgacgtgcttgagcccgatcatgtaaccccatacggtattggtgcggcatttcttctccgtacgcagaaaatactcgaagttgttgatgaacgtcaggttgagttccttcaggggaatgtcgtcacggcggtacactttcgggacgaactcgcaaaggtgcctgtatatggtacggtagcggttgtatgttccctgcacgcggctgtgtcccactttcttgatgaactcctcgttgtgctgctcgaagagtttcaacagcgtctcgcgtttcacgcccagcccgaggcaggcgtccctcagcctggcggcggtgacatagccgtcggactgcatcagttcctggtaacggcggttcacgtccacgcgtatccggtcaacctccgcattgattttctgcgcctcggcgctcttgcccgtggcacgtgccgttttcacgtcccaaagtttcggaggtacgtccagtttacaactgaactgcttgatttcaccgtccaccgtaagacggcacattagggggagatagccgttggctctctcgctgcccttcttcacgtagaagaggattttgaaagtcgatctgctcatactcgttttcatacttttttgatcgttacaaagttaatatcaagcgagttgtcctcaggtatgaaaaactgtgcaaattactgaaatagaacccgttgtgccgtttcttattcccgttatatcagtaacgatatgggaactgaagtctttcgctgtttttagcggatctcctttttcagcttatgcagtattatgagttaaacacctaactgcttaatagactgcattcttgctgtattatcatcaaccttgctttttcttgctgcgtttactttaaaattcagttctgacaaaaaattaaaaacccgcattcaaagcgggtttcagaaaatagatacaatattgaaagaaaatagatccattttttaaaccgttttcatagccacaataacggatgtcggatcggcaagttacggattacctcatcgtttgtcggaaaatgttccaaacttttccaaatttccagataagtcctattagatgtgttacaaatactgaataaaagggcaggctgggcaaccggccattcatcccaaaacatgacatcttcggcaaaaggccagctcgatttatctgctatatacgggaatagccaagcaaccgccttttgcatattgcgaccgtcgtccatcgagtactgccacaaatcatcttccccgtccgaaagaatatggcagatcgtagccatggcatccagattgaacaaggaatagccgtacggtttcgtccgtttcagttcaagcggaaaactgccgtcctccgccatctgtgaaggaagcagaacagacctgtaacggttccggcaaaagtcgagaatctccttatcgccggtatacttagcaaactgggctacctgcatcacccaacaagttccatgattgtttttagcattcatctcgtctaccccgtaaggatgcgttgtcaaccatttcagataatcggaaaaccaagcacggctaccagccacatcctcaacagaaagaacgccggcctcttccatcctgataagggattgcacgacctccaggagatggatcgtatcgatgataccgatcccccgtcctgtcacgatccctttgatcgcctgcgcgtattgcaggtctggattcatccgggtttcgggggcgatgaaccaggcgcggatatgcttaactgcttgccgaatatatttctcgtctttcgtcaccagccaggcggaggtcaagtcgccaaccagcgaactgaagcggatcatggcatgacggtgagcaacaaagttatcgggatttgtctgcccatctcgacgtatataggcactatccggatttatcggattgggccaccaataatcgccttcggagtagaaatcatgaattcctccggtacttctttccgctctatatgcagtaatggtcacaggttcttctaccaaggccttatctccacgaataacaatttcagttcggagtaaatccgtcacttcttcctttaaagaaggatctctcttgcattggcaaaataacaaaagaataacataaagtaataatttatacatgatatagattttttttattttgttgcacatattcggtcggcgacatgccgtacatcgctttgaaacaagtagcaaaataagcatgggaattgaaaccgatattggcagaaacttcagatatgttcatatccgtttccagcagcatccttgcagcaatctcaagacgtttgttacggatcaaatccaccggcgaaaggtcggttatcgctttcagcttcctatagaagttggcacgtcccataccgactcctttacatagaatctccacattcaaccccggattggaaagattctgctcaatcaccccgaacaatttttgcataaatgtatcgtccgccgatgtcgtctcgatacccaatgactccaacgaaaattttttcccatacaattccttcaaccgttcacgagaagccaagatattccgaatacgacacagcaggacctccatattgaaaggcttcacgatataatcgtccgcaccgcactggaatccctctttgatatgcatcaccatcgatttcgccgtaatgatgataaccgggatatgtccggtccgcaaatcctgcttgatctccgaacaaagttgcaagccgtcttttttcggcatcataatgtcgcttaccaccagatccggcaaggtttctgcaatcttatcgaaagcatctaccccgttctccgcttcaagcacatcgaaataaggttcgagatgtttgcagatataccgacggacatccggattatcttcggctaataacaaggtataacgctgaccggaaacaggcagctgttcctgcatattgtcagggactttggattcatcctcagctacttctattcctccgtagggattcctcgcagaagagtcatcttctgcaaattgctcatgagcatatgcttcgcggtttaccggaatcaagacacggaatacagccccttttggtttgttgtcttctacccatacaacccctttatgcaatttcacgatagagagtaccagacttaaccctataccggttccagccgtattcgactcactttcatccgttccctggtaaaaaggggaaaatatatgaaacttgtcggaatcgtctatccctttccctgtgtcttctacagacagacaaacatatcgagaagttccccgaacttccccacttatcctgccgggaaattgctcctgcaatccggcaactgagaacaattgcaaacgaatggttatcgactcatccggaaccgtatgtttgaaagcgttcgacaaaagattgaaaaataccttctccagtaaaacacggtcgaaccacgcatctattcccgactcatcggattccaaacgaaaggtaatccgttccttgaccgcaatctgattaaaggcaatatatatctcctgcgtaaacagatacagatcattatgcgaaacacgtagttgcaggttgccactctggttcttcctcagatccattaactggttcaccagcaacaaaagacgctgggcatttccatagaccagacgcaacgaatctttcaggttcgggttcatatctacccgttgcaacacctcttccaaaggagacaggatcaacatcaacggtgtacgcaattcgtgcgaaaaattggtaaacatgcgtattttggactgatggaactcctcctgccgctgctgctccttctgcttttcgaccaggtcctgttccagcttacgcttcatatgcagataataccagaccacataaaggatgccacctataatcagcagatacaacatataggcataccaggtctgccagaatggagtccgaatatgaatcgacaacgaccgcccttcatcgttccaaagaccgtcgttattggaggcgcgaacacgaaaaacataatctcccggtttcaagttcgtatagaaagcctcctttcgagaaccagcatcattccagtccgtatcatacccttctagcatataagcatatttattctgattcggataaagatagtttaaagcggcatacccaacagagaagttattctgattataatcaagatctatcgcctgcgtataatcaagaactttatcgagcaaccccgaagggtcgccgggaacaaccggtttattgttaaccgtaaaagaggtcagtacgaccggaggtataaaacggttttctatcaaccgttcagggtaaaaggagacaaggccgttgcttccgctgaaatagattcggtcaccgggcaatttgatgccgcctttcatgctgaattcattaactgggatctcgcttctacccatataattggtaaactggcgcgattcaggatcgtaggcagaaataccgttaccggtactgatccaaagtttaccgtcgtctccgggaattatcgaattgatattatcgtcgctcagcccctcgacggccgtcaaccactccataatgcctttttcttcgtcaaagcgacaaaaacctccaccgaaagtacctatccagattcgcccctccctatcctttacgatattacttacctggtcgttgtataacttccgggaaccttcctcacgagtattatattttatcaacttatgcgtatgggaatcgtagagcgccagtccgccggtatgcatacctaccaaataaacaccgtcccgtatctccaggaaactgcgtacacttggcaacaaggcgaaaacagaatccgacggagcgatcctgccgtctggaaacacacggacaattcccgtgttgtctgtcgttcccaaccacaatgcaccatcactgcaacgcgtgatcgtataaatactaacctccttatgaaaagtataaaaaagagagaatttctttgtccgggtatcgaatcggtataaagtgcctttctgcgttccgcaccaaacgaaatcgccctccacaaacagagatttgataatattccgatcattcagagcattcggccgagcatccagcagaaaacgttcaaacatatctgtattcaaatccagtgaaagtaggcctcgcccttccgaagcaatccacaaagtatggtccggctgataggccatcgtggcaaagattccaaacagcttgtctgaaccaccctgcaaatcgtaaaaagtaaaacggctgttcaaaggattactgtaactgacacctccagcgtatgtgccaatccataacgtattcgcattatctacgaaagcagaaaagacggaaaaatgactaaggcctcctttttgttcgtcaaaattcgtataggtcgtacatgaaccgtccaccaagttcaaaagacttaatccgttaaaagttccgaccactagttgaccattataagtattgattgtacgaaccgaattatttcccagtctgccgttccaagcagtataatgcgtaacagcatttgtctccgtgtcgatccggttcaatccacccgaacgggttcccacccacagacgtccttcgctgtcttcatggatagcagatatattattatccgttaatgaaaagggagtcgtatttttaaaataatgagacaagagattcaacttactgtcacagatataaagtccgttttgtaaagttccgactaacagattgccatcatggtcttcgttgataaccataatctggtcacgtggcagttctccctccaagtcgttcaagataaacgaatcattctcataatcatacaagtatagacctttatttgttccaacccaaaaacgcttttgtctatccacatacaagcttgaaatccacgtatgataaaggggagactgcttataagcagccatatcgttgagagaatatacacgatccaccctcaaatccatccggttcagaccgttcatcgtgcctacccacaagtttccacggtcatcttcagccaatgctgtcacatgattactggacaagcttaatgagtcgccattactatgtttatacacgacaaaagaattaccgtcataacgattcaagccgttacgcgtggcaaaccacatgaaaccgctcttatcctgatgtattttcaagacggaaagctgcgacaaaccttcttccatttttaaagaagaaaaagaaaaaggtgaaacagccccattcagcaaggcactaaagcaacaaagcaaaagagtgatcaagtatgttttcctcataacgtaaaagcattacgctacaaagatacgaaaacagatcaaatgcccagtcctgtcacaaacagaaaacgtactccgtcctcgcatcctgtaaaaccaacgtatttatcccactgttttcattatgcaaaataacatttgaatggaatcagttgtttacttattaacatatatgctttaaacaagggataaatatccggcaaccccttccgcacaccgttcaccatcaatagcagcagagacgattccgcctgcatagccggcgccttctccacaaggaaaaagacctttcaaggttatatgctggtagctttccttgtcgcgcaggatacggacgggcgaagaggtccgggtttccaccccgatcatcaccgcgtcattggtcaggaagcctctggagactttaccgaaatggcggaagccctcacgtaagcggccggtgacgaactccggcatccagaaatgcaacggggaagccagcagaccgggcgtataagaggattcgggaagatcgaaagagtttttcttattcacgaaatcaaccatccgctgtgcaggggcggtttgcttcatcccgccattcagccagcaaagttcttccaaacgttcttggaaagccatcaaagcgagcggcgaatccttgctgaccgccatttcttcgtgtttcatcaattcggaatagtcttccgggcgtatctccaccaccatgccggaattcgcccagcgggaaccacgattggaaggagacattccattgactaccacctggcgggaactacttgccgccgggacgacgaaaccgcctggacacatacaaaaagaatagactccccgtccgccggcttgcgccacaaaactatattcggctgccggcagatagtttcctctaccctccttacgatgatattgtatctggtcgatcagcatctgcggatgttccaaacggacgccgacagcaatgcctttggcttcgatagggatttgccggtcatggaggtagcgatacacatcccgggcggaatgaccggttgccaggatgaccggtcccagaaagttctcgcccgtattcgtttcgacacctacgacttccccactccggatgaccaaggcatccattcgtgtctcgaaatggacctccccaccacagcggataatctgttcgcggatattctcgatcacacgcggcaacttgtccgtaccgatatgcggatgggcgtccgccaaaatcgaagtgctcgccccgaactggcaaaagacattcagaatcttgtcaaccgaaccccgtttcttgctgcgagtgtaaagtttgccgtcagaataggcaccggctcccccttcaccgaaactatagttggactcttcgtccaccttatgctcacggctgatcagagcgatatcctttttacgttcgcgcacgttctttccacgttcgatcacgatcggacgtaagccgagctcaatcagacgaagagcagcaaacaaaccacccggccccgctcctaccaccacgacaggtttcccagctgatacgtctttatattccaccaattgaaattctggttcatctggctgctcattgataaaagcacgcagttttacattcacatagatcgtacgctgacgtgcatcgatagaacgttttagtacccgaacggtgtggatgtacggggcagatgttcccgtctcgcgagccaccacctgcttcagcgactgttcgctgactgcttcttcaggcaatatacggagttgtaattcttgtatcattgttacttctttaaattcaaacaaaaaatcaaaccgacttgtgccctgtatccgctccaatccactttgaaagtcgatggaaaatctggattccgactctgacacttctgcatcacagcatcccattcataagcgatactcatgtttaatgcaacatagcggcataggctaaacttgatgccaaaagtaggctccacaaagaagttcctgccggaaaaagtattatccttccggtatccaacttccgggtcggactcgacgaacaggcggtttatctcgttcaccttgttcagcacaaaacctgtcgagagccccacatacggctcgaatgtaaagatactgactttttccttcaccagacagaagtggtaaaaagtaccgagcttatatcctttgttacgcaactcgtagtcgcaagagccggaataatccgttactccattcttgcccgccgtattcatatagttaaaaagaaatcccacatgatggcgccgccattcgactccgacacgggcatcttgcgtcacataaccggggaaattatctgtaacctgtgcattggtaacaggaagcatctgatttttcaatatatctttcatatcggacatctgatacgaaccgtgaccaatattatattcgattgtcaacgactgagcctgcccgaaacggtcgaaaaagaacagaatggctataaataataatacctttttcatatattcggacagttttcgaggttaaacgaataatttgcattcttataaccccagtcaccgacgggagaaaaacgcaattcaaccacacgctcttcctgcccggcaagagaaaattccgcaatgccgtccgtcaccttctccgccacgatttcaccaccatagacgacatcgactgccgaacggtaaggatatgtccaggacaagcgtatacgatcttccttcatatattctacctgcacctctggttcagcttgctccaaatcaagcgatccaagcgaacggggacggtcggcttccgacttgaaataaatatagaccttatattcccccttctccccagcatatcgcttatcggcataaaaacatttgtcgaaatccgacctttgcgtgatataggttgaatgagcattctcgtcaatcgtactgaactctatctggtaatggtcgaatccggcacggagtgccccgtctacctcccaaaatatttcgatcagtccttcttcattcacacgatgccgcaaagagaactccgactcggtacgcgcgtttatcttgaggggccaactacgcttttccacatatcgctcgaccccgacctgtccggcaaccgtcccattattcgtccgggcgaaaacctcgcacgacaactcataagagccattcggaatcagatccacatccagcatgaaatcacatcgtgtcccatcgctttcccattccatctctccaatgcggacgatctgcttctcaacctcaaatccgggcaacggactgatttggcaagcagcattaccactatgttccaccacaaagattttgttttcccaatcatggataaacggaccatagaagtccacactcatcgcaaccgaatcagcctgccacttttcaaaatccataaaattctcccccagccgatactcgcagcttgtaaacaagaagaaaacacttacaaatagataaacaacacttttattcatatacatataaacttatccgaacaattgccggaaagcctcttccaccttgcgcacttgcacgatttgcatcttgcatttggatgtgtcgaaacctttcaggttattgtgcgggatgataatgcgcgagaaacccaatttttccgcttctaggatgcgctgctcgatacggttcaccggacggatctctcccgaaagccccacctcgccacacatcgagatacccggctcgatcaaaatgtcgaggctagaagaaagaattgcactgatcaccgccaagtcgatcgccggatcattcaccttcagcccaccggcaatattcaaaaagacgtctttctgaaccagcttaaatccggcacgcttttcgagcaccgcgagcaacatattcatacgcctaagatcgaatcctgtcgcgctacgctgaggcgtcccatagacagcagaactcaccaacgcctgtgtctcgatcaggaagggacggatgccctcaatcgcagccgcgatcgccacgccgctcaatccctcatgattctgcgttaggagtagttcagaagggttactgacttcgcgaagaccatcctggcgcatctcgtaaatacctaattccgctgtgcttccgaaacggttcttgatgctgcggaggatacgatacatataatgctggtcgccctcaaattgaagtacggtgtcaacgatatgttccaacaccttcggcccagcaatactcccttccttattgatatggccgatcagaagaacaggtgtgccgctctccttcgcatatttcagaatagccgcactgcactcgcgtacctgcgaaacacttccgggagaagattcgaccacctccgtataaatggtttgtatcgagtcgataatcaagaggtcgggttgaacgttcttggtctgtacgaatatctgttcgagattggtctcacagagaatgaaacaatctggattctcgtgcgcgatgcggtcggcacggagtttcaactggcgactgctctcctcgccggagacgtaaagcgtgcggagtcccttcaaccccaaaacggtttgcaggacgagggtcgatttcccgatacccggttccccgccgatcaagaccagtgatccttttaccagaccgccgccaagaacacggttcaactcccggtctccgaggtcgacacgcgtctcctcttcagaagtaatatctcgaagcaggacgggacgcactttgccaccatccgaaacgccataaagtgcccgctttccgaccggttcctttaccacgatctcctcaacatacgtgttccactccccgcaggaaggacatttcccgatccatttcggagagtcagccccacagttggagcaaacatataccgtttttgcttttaccattctcttatttattaattacatggacgctttggagacataaaaaacattccattttttaagattataaaactgtcaattcacggacgaaaagacgatttattatccgaaaagatcaagcgtcaactgctttttctcagcttcgagcttcctgaggtggcgtttcccttgcggcgtaatgatttccatcttatcgaagcgggtacggatcaccgtctcgaccgtgtagctgatgttaaccacttcacctagttcactcatcttccgttgtatctccagcacacaatctatacacataccgctcttgaaggcaatcttttcatcgaacatatctttcttgaaatcttcgtcgcacatgtaaaagtcgattgtctcgccccccttgttgtagatgcctttccaacgataacgggcatctttcagcacaggtgagatgatttctatcgttgctttgttgtctttaacaggaggcaattcgtcagaacggaggatgtaatagtcaaactgttcgcgtttgacctccaacgatcccgaacggctacggttattttcgttcagttcgcgtaaagtgaactttgtcaccttcggataaccgcgtacagcttcgtaaaagttcgatttgcatttacaaaaacgcggcgatgcgctgagcagttccaccaactcgcgcgtcacggtaataccgggcattttttttctcaaattactacgcaataaggcaatttcgcgctgcatcttttcctcgtcggccaccgaacggtccacaaccggttgtccaccgaccaaaagggacggacgcgtccatacctgcatgaacaagttaagaagaacagagatcagacggctgttttcacctgccaccgaccagatttcgcgaaagccctcctgttgggcaaaagactcgcaatagacagtcattttgatatccaacatgtctgctaacgtccgaacaagcgagagtacctccttttctgaacgatgtttgatcatggcatccatgtagtttgacttatcattgaagtagtaccgcagttcgagtttgttatcaaactttatcatgacttactctgttttggtttttcgatcgaagaacgggtttttcgaggacgcgcttaccggaatcgccatcacacatttgcagtcgcccaacattcccaaacgctgtgcagccataccggcactgaacatcacacgtgtatccaggcgcaaatccgacgccgtggcacaagccgaaccgaccgcaatgcccaagtccaccgaattaatcgcacaagggacggcttccggcttctccacacaagtcggaaacccgcagtgcgcgcaattcaaaccctgaacctgctggcgtgtaccagcaatcatgatagcttcagcctgaagaatattgtcagcatcacgcaaaaagaattttaaaccggtttcgccggacatgatgacaagctcttcggaaaggcgtttgatatcttcatccgtcaccatcgccacttcaataatatcgatgcctttccctttcggagctgtccgagcggctgtcatcatctgacgaacagcctgtaacacatactcgtgtcgtatttctctttcgttctgtatcattttatattggtttagcacgaacaaagataataattactcgttttatagctcaagatttgtcatcttttctgtaacatcaaatggatagtcggggtattcgtaaatactgaaacgaggttcagtcctcccctcggaataattccaaatactaatatactcccgcacatcttcacccatatcctgtaattggcgcaggtaggcggcgacggacttgttctcgacgatgtagacttctcccatccgatcgataatcggactgtgacggcgtccggtgtcgtggtcgaatttcaagatacgctttccctctgttgtcaaaccgaccatctgaaaagtcatgcttttgccgatggctggaagattcaacacactgcgatcggtggcagcaaaaagaagacggttctctttcaaaaaaccggacaatttctttcctaagggtcgctcatagcggatcagccgatacagttccttctgcttctctttggggataaggccgaaaactttctcttcttgctgttcctgtaaagaacggctattaggagcgaacacggcatagttttcgtgaaaacccttaaccgaaaaagtgtaatagcacaccactcccatcgcattcaacgtctgacgaagttttgccgtatgtccacgccgagaagcggcaacggtgtagaccaactggttggtgatgatccaaccggcggagagaatcgcctcgatcgccttttttgcttccggcgtgacctccaacggggattgaaaatgtgtctggataataaactgcgtaacaccgacacgtgaggctttatctttgaaactcctcaagatgccgactagttcgtccgtgattctgagaggcaagtaggcaagcaggcgagaacccaagcggacccgttgtaactcagcgtacttctccccttcgggacgactctcgttggcttttcgtttccggaccgccatcttatagacggcatcaagtatgttgcggagcgtcgcgttctgactcatcaacgcgtcgcctccagtaatcaagatatccctaagctgcgcatcctcttcaaaatagcgcatcaaccgacgcagtttcttatcccatgtttcctttggtttcaaagattcgaaatcaaaattcaagcgctcgctctggaaatcatacatccgttggcaggaagcgcacagcccgccacaggcacgccccatcgaatcggggatcaggatcgccacctccggataccggcggtgtatgttgtgtccttccggcaacaaccatcctgcagcattcggctgtccggccacgactatgtcttctttctcccacgccttgatccggccatatgtatcgaccagttcttccgaataaaggatataagagcggatggcagcgtcgtcatatccgcttgtattcgtgttcagcagggaaaggtaataaggagtcacaaaaaacggcatgcctttcttacgagcacgtgccaacaggtccatcgttccagccgacagggaaccgccaaggaaatagttcagttccgtcgggcttttgaaagccatcgcaagatggaaacggccggtattccaccattcctgcactttgacgtatttctcggcatagctcatcccttccgtaaactggaaccgagaggtcggggcatgacgccgttcgatcttacgtatcaacccggcaatgatccgctccttgttggagtgacggatcgccatcacctcctcgtccagcccggtcggccaacggttcatctgccgtttgacaagcgaacggtccggaacgatttcctccggcttctccagcaattcgaattgccggtacaggtcgataaagaagtccggcgaaacatcttcctccagcttcccggccaggaactgccacaggcaggtaatcgtccgtaccggcatctcctcacctgtcgaaagctcggagaccatcataccgtcatgttcgatcaacagaagaatacgcttcgccacggcatttcccatattgctcccgccaaccgtcctgtcgatgcgggaaaaaacaaaagagcgcaaggcttctttaaaaagcgctgcgctctcactctcttccgccatcgttaccagttggggaaaatcttttttaaatacttttgtcaattgcggaatgtcgtacgatagtaatcttcttttaatcataagcaaatactttttaggaagggttattgaatgttattttgaagtcatttgtctacaaatataacatttttctcccaccatcaaaagcgtgctacttataaaacatcttaaaagtcttgcgaatcacaacaaaatgacaaaacaaggaacctattcgccacctttctgctacttccgcttcatcttcacttcatacaggtcgtgccggcgatctttcaagttacggacacttccgtacgtatgcaattcgttcagcaaatcgagatccacatccgacaccaagatcatttccgtattcggggtcgcctccgcccttttcccgtctgtcgggaaagcaaaatcacacggggtgaagacaccggactgcgcatactggatatccatgttatggacacggggcaagttaccgacactaccggctatgacgacaaagcattcgttttcgatcgcacgtgcctgcgcacaaacacggacacgcgaataggcgttctgcgtatcggtaaggaagggcacaaacagaatctgcatcccctggtccgccatgatacgcgacagttccggaaattcgacatcgtagcagatcaggacaccgatcttggcacagtccgtttcgaaagtctgcaccatcttaccgccggaaagtccccagctcttcgcttcatcgggcgtgatatgcactttctcgtacgtctcataactaccgtcgcggcgacaaaggaaaccgacgttgtacaacccgtcgtctttgatcaacggcatgctcccggtaatgatattgatattgtagctgatcgccaagttgatgaagcggttcagcatctcgtccgtatatttcgccagctcgcggatcgcctccgactcgctcatgtggttgaacttagccatcaaaggggcattgaagtattcggggaaaaggatgaagtcactcttatagtcagatacggcatccacgaaaaattccacctgttcgaacacgtcatcgagccccttgtaaggtcgcatctgccactggacaagaccgacgcggacggtcgtcttggtcgaaactatttccggagtcggctggtaatagatattgtcccattgcagcagggttgcataatgtttggattcctcatcgttcggcaaataattcgtcatcactttacgaacatggaaatcattcgatatttgaaaagtcagcaccggatcataaatttctcttttacggaccttatcaatatattccttcgggcgcatcgtatccgcatatttatgataattcgggatacgtccgccgaacataatcgctttcaagttcaggctttcacacaattccttccgataatcatacatacgccgtgccaaacgcaggccccggtaatcgggatggataaagacctctattccatacaggatattgccttttggattatgcgtattaaaggtttcgtttccagtaacaaaggcgtaagtatggtcgttctttaccttgtcgtaatcgacgatgatagacaaggcgcaccccacgatcttatcatccacgaccgtaaccacctgcccttccgggaaaatagtgattaacttcttgatttgctcacgtgtccaaaacacatccgagccgtctgaataaactcttgtaaaagattgagataattgtcggtagtccgccatctgcaaagtacggacctctactttgttaatcttaggagcatgttccatttctcatttcaatttttaagaacgatgcaaaagtataaaaagtttcatctggatgaaacaaaaattccatgataaccaaaaagacggatgcaaaccttctacatccgtcttttcgtctaaaagctttagcaaccaccgcccaacgcccggtagagaaggatctttttccggcaaagatcggtgatgatgtcgatacgttccaattcgctatccagataacgttcattggcagagagcacttcgaggaagccgacataattcaatttgaaaagttcattggcattggtgaccgaacgttggtgagctacggtctccacttctttcaggcggacacgctccacttggtttagaccggcacaatacaaatccaatacttccgtataggccttcaaggccgtttcgtgatattgcgacaaggcaatccgttgcgaagcacgcgcctcgttccacatcgaacgaatctggttccgctggaagactggtgcagtaattcctgctgccaaatcgtaaaccagcgaagcaggcgctgtgaaccatttgccaagatcaaagctattgaagccgcctcccgcacccaacaccaacgaaggatagaaggctgctttagccgccattacatccgcctttgaagccagcaattccatctcggcggcccgtacgtcgggacgtaaggtcagcatgttcgccggaacaccgtctgatagcgggaaagggatctgacgcagttcttcaaaactcatacgcctgatttcaaacggaaagacacctaacaggcaggctatcgcacgctctttctccccgatcagttggtcattttccaacagtttgctttctatcagtagcatacgggcatgaaactggtcgacagccaactgcgtctcggccccctccttcttcagctggcgagttagctcatacgaacgtttggaactgatatgggcttcttccaagacatcccgacgtttatccaaaccgatcagttcataatagtggacagccaattcggatatcaggaccgactgcgcaaaacgggttgcctcaaccgaagccatccaacgagctacagccgcctgtttcttacgtgtcagcttcccccatatatccgcttcccactggaaattcaggaaaagtccgaaatcacggtaagggtccgggatatgtttgtctttcgccaaggaaggaacattagtctcgctattccccactccgtccatcgtatattcgccgaaacggttgaccgaagtcccgatgccgaggctaacttcaggcaatagcaagccttttgcccgttgcaggttggcccggctcattgtcacccgttccatgctttgcttgaacgaatagttattctgcaaagcgacctccacatatccttgtaagatggaatcctggaaaaacacattccactccaacggctttacaaatgcagtgtcataggtatgcccatctccttctggcagtacggcacgttccccatctggagagagctgcggagccttgcaagctgtaaggccgatcgcggcccacaagccaactgtagcaattatcttaaaactcatattcttcttcatttgctttttgtttcttttcctttaagtaagttgccaacgattcaaatatcacataaagccccggtatcaggaagatccccacgaacgtaccgatcagcatacctccggccgccgccgtcccgatggaacgattgcccaaagcaccagcgccactggctaccgccaacgggatcaaaccgctgataaaagcaaaagaagtcatcagaatcggacgcaaacggctggttgccccttggatggccgctcccataatgctaacgccttccttgcggcactggttcgccacctcgataatcaggatcgcattcttacctaagaggccgatcagcatcacgagtgccacctgagcataaatattattctccagtcccaccgcatatagtaaaaggaatgatccgaacacacctgccggaagcgagaggataaccggaagcggcagcaaaaggctttcatactgggccgccagaagaagatagacaaagaccagacagatcgcgaaaataaccaaggattgtccaccggattctttctcctcacgggcaacgccggaccattctatatcgtagcctctcggcaacacttcggcagcaatctcctctacggcttccaaggcttcacccgagctgactcccggtgcttgttcaccggtaatcatggccgaagtaaacaggttataacgggtaatctgactcggaccatacacgcgctccattgtcatgaagttggaatacggaaccatgttcccctctttatttttagcatacaaaccgaacagatcctccggattcatacgatattcgggagcagcctgcaacatcaccttgtacatttgcccgaaacggacgaagttggaagaatagaaactcccgacataggattgcaaagtttccatcgactcgttcacatcaattcccagttttgccgctttggccagatcgacccgcaacagatattgcgggaagttcggattgaaaccggatgtgacacccgacaaacgaggatcggcattcagcttggccacaaacgatttggccacttcgtccaactcggcaaatgtcccggcagtcttatcctgcaaacgaagttcgaaaccactggcattaccgaaaccgggaaccgtcggtggaaggaagaactggatatccgcatccttgatatgcgacacgcggtcagcatagacgcgcatcagttcctcggccgtctgctcgcgttcgttccaaggcttcaagttgatcatccccatgccaaaactggctccttccgtttccgtcatcaagctgtagcctgccaatgtggaaaccgtttccacttcttccaacggcaacagagcggcctgcactttgctcaaagcagcttccgaacgttcgagagtcgctccgggaggcgcatcgacattcacatagatcattccctggtcttcattagggataaaacccgaaggcaacacaaacgtcataccccatgttgccagacagaaaataatcaacgacgcataggtcaggaaacgcctgttcaggaacaaacgcagattgatcttataacggcgttccagatgatcgtagcgcttattgaatccgtcgaagaaacgcgccaacaaacttttcttcacctttttgtcatgcgagacaggcttcagcatcaaggcgcagagtgcgggagacagcgtcaaggcattcacgcccgaaatgacaatcgccactgccagcgtcaacgaaaactgacggtagaaaataccgaccgtaccggacataaagcctaccgggacgaacacggcagacatcaccagggtaatggcaataatcgccccgccgatttcacgaatggcggcttcggtggcttttgccggtggaagtttttcgttgtgcatcttcacatgtaccgcctccaccacgacaatggcattatcgaccacgataccgattgccagcaccagtgcgaacagtgtcagcatattgatggagaaacccaacatctgcataaaaaagaaagtcccgacaagcgaaacaggaacggctatcgccggaatcaacgtcgaacggaaatcctgcaggaacaaatataccacgataaacaccagcaaaaaggcttccaacaacgtccggagcacaaccgaaatcgaagcatccagaaatcgcgaaacatcgtacgatatattataatccattccgggggcaaaactgctttccttgatttcctccatcttggctttgatattctgaatcacctcacgggcattcgaacccggacgctgcttgatcatgatagaggcggaaggcttgccgtcggtcatggaaatcatattatagtcttccgaatcgaactcaatcgtcgccacatccttcaaccggagaaccgaaccgtccggcaaagccttcaacacgatctcgccatattcttcgggagtgctgaacttcccgctatattgcaatacatattgcaactgctgcggaatcttatccgaactgataccggtcttcccaggagcagcttcgatattttgcgaacggatagcggcggtcacttcctgcggtgacatattataggctgccagccggttggggttcagccacacgcgcatcgcataatcgcggcttcccatgatctcgacaaaaccgaccccatcgattcgcttcagctcacgcaggatattgatatcggcaaaattgtacacaaacttctcggtatgcgaactgtccgtgctcatgatgttcagatacatcaacatactgtttacttctttctcggtaatcacaccggcacggatcacttcttcgggaagttcatcgaggactgtcgtcacacggttctgcacattcacggaggcgacatccggatcggttcctaccttaaaatagatcgtcgtcagcgacataccgtcattcgtacaaacggtcgtcatataggtcattccaggcacaccattgatagcacgttccaagggagtcgccacagttttagccatcacatcggcattggctcccgtataacgggccgtcaccgtaacggaaggcggaacaatatcgggaaactgggtaatcggcaaagaggtaatagccagcaaacccagaaaaacaatcacaacagaaatgacaccggatagaatcgggcgtctgatgaatatttcaaacatacggcttacttattattttcgacttcatcagacaattccaattgtttacggaccgtttcggcatccacaatctcaggcgtaataaccattccgtcactcacttgctggactccttcataaacgatcagcgtattgtcaggcaggtctttcgttacataataggcaccgtgacgagagagtggttcgaaactgcggacactcactttgccttcttcatcaacagtatacacgtaagtaaaatcctgaatctcgaatgtcgaacgttgcgggaccagtatcacgtcttccatttctgtcagcatacggattttacccgaaacaccatgtcgcaacaggcggtccggattggcaaaacgcgcacgaaaagcaatggaacccgtaccgcgttcaaaatcaccttctacggtttcgactgttcctttgtacggataggttgtctggtccgacaggatcaactccagattgttatactccggctgttccactccgctcaactgcgtacgtttatattcaagatattctttctcgttgatcttgaaataggcaaacatttccgaaacatccgtcagggaggtcaacaagctggacggcgtgaccaagctaccgaccttaaacggtatacggtccacatacccttcaaaaggagatgtgatggtcgtataggaataattcgtttccgcacgaagcaaacgcgatttggcctgctgtacccgcaaacgggcgacatcggcttccgctaatgcctgttccaagcggatcggcgaaatgatgtccttttccaccaagcgctttacacggtccgcttcgacttccgccattttcaactcggcctgtacttgcttataattggcctgcgcctctttgacctcttcatacagttcggcagaggaaagcttgaacaagacctgtcccttcttcacgtgctctccttcgtcaaccaagacatcttcaacgaacccttccactttcggtttaacctccacaaactggacagcctgaacatcagccacatacgattgagccacttcgatactcgtagctaccagcttcaccaccagcgtattgtttttacttccggattttttttcatgactccggttacaagaggtaaaaaagctggctattaaaaacaaaaaaggtaaatagttaaaaaataatcttctcgtcataaatcgtttctgattagtttatttttaggttataattataaacatgataaagcgtgcaatatcagggatacgacaaagccttccgcataccggcacaacatacccatacacgctctgaaaaataaaaagaatcggataagacctaaatcagataggaacaaaaccagacaaaactctgggttttatgaagttgataaaatataggtaagaatgcacattgctgcaattcaagagaatgaatcagctcatgcacatttattatagtcagccagtcggctataaagtctgcaacaaactgttggatttgaatctgttcctgccggacagtacgcaacgaggcattatcgtcaaaatcaagtacatcatgcactccattctctaccacctcgatggaagaacttgggaaaccttccagaaagaaatcgctaccaactgaataaaacggcataaagaccaacatgatcatcaaaatcacacgctggtaaaactttatctttttatccacggtagttactaacattccttccctaaaaaactttttgcaaagataaagaatccatatcttatttcaaaataccgttaattaatcccataaagaaaaagtcccgacgataataaatcatcaggactttgcggagaaagcgggattcgaacccgcgaaaccctttaggggtttacacgctttccaggcgtgcctcttcaaccactcgagcatctctccttttcggttgattatgtatatcaagaagcaacctgcctccataaaatgtaaaaagcagcttttgctgctttcagcggagagagagggattcgaacccccggaacctctcagttcaacggttttcaagaccgccgcaatcgaccactctgccatctctccttgtctctaagacgggtgcaaaagtagatggtttatttgaattatgcaagtttttcatttcatttctttttacttttttcgtatttcattcctccatttctgattatcagacacataaaaaaaaatccgattcctactactatgcacaggaaccggatataaattatatatagagaaattaaaacactctttttagaaaacaagcatctgcctatttcgtttgcagacagcttgaatgcaagaccatatgagccttctcctgctcagtcctgattgacccggcagccagaataatagttatgatcaaaccgatacaagccactatagcaatcacttccgtacttttgcgggaaagatactcccctatgttcttttccatgcgtattacttttttaatgaataatctgctgacctgaaatgtgtgattcaaaattaagaagaaaaggaaagctaagggagacggtgaataaataagtggacagacaaaacactcaaatatctatttaacaacaagatacaaatcttttatattactaaaaaagtggatcaaatataaaaggattaatgaattttccggactaaattctcgaaatcatccctggaaacgcatgccttgttctttacttttgcccgataattatagatggtattcaccgaatagcgaaggaattcggctatctgagaactgtcgtttatccccaaacggatcaacgcaaaaatacgaagttccgtattcagcaactcgtcccttttcagtaccacctgctcatcttcaagcaaaagtgaattaaattgtgtcacaaaattcgggaacagatggagaaatgcagtatcaaaattcttataaagtgcattcagctccgcctccaacccctttgacgatcgggtaactttaaccagttccccgatctgtccggaagaaaccattttataaaccatacggcgataaccgtcgagtttatcgatataagaagaacacagactcatgaaacgcccgatatattcctccttgatccggttggattcggacagttcgaggttggcggactgcaaacgatcgttcatctgatacaattcgccgttcagcaccttcaactgctcgtttgtctcctgcaaatgattgcgggcctccgccagtcgcttcatctgccgatatatatagacgatggcagagatcaataacaaagtaagtacactgatcagcgtcagatatgcgaccagtatccggttcttcccttctatcgtagcctggtagttcttatcgatcaacgaaaggatatccgcactctgccaacttcttgagcgggcacgaaaccggttcgtctcatcccaagaaaaacggatataatgataagcacgctcgatatcgccatctttaagcaataaatcagccaacatccacaaggaagcatgatctgtgatagccgactgaatatctgacaaggaagaaagggccaaataatacttttctttttcccgatcttttttctggcggtagatcatcgcacgctgataagaagtaagtgcatattcaggagttccgaacggaatttttgccaaacgtgtatcattgatccgaagggcttcatcagtacgtccgtcagccctcaaagccagttcctgcaactcaacccgcttgccggcatcttccggcaacatcatcgctaaagaatcccgatagacgaaagatttatcttcatagcggcgtatactttgcggatcacgggaattaccggagatctccctgtatacctgctctttgcaggcgtaataatcacgggtaagagaaactggcaaatcttcacggcggacttcctccaatacatcgatcgcttcttgatacatgccagttgcagcatgcagggaggctaacagcaatttacttttgtactcccgctcctgatcacgcaaattacgggcgatcctgatatttttggtcagatagaggacagccgaatcgcacatataagatttatattcccgataaatgctatcgttgagctggtaagcggcaatagagttcggagctgtcttggttgcttttcctttcaattcacggatccgggcttctctcctgtctttataaatctcatgctggagaatcgtttgatccaaattgactaataaagagtcgaggttactttccgcaaaaaccatatttgcagtaaaaaacaaaaacagaattatcctgtacctctttcccatttcgactccagcttatttccggcagacaaatgtaaaacaaaaaagctttcctccggacaaatagccggggaaaagctcttaaatacataaaaacaatctgatatcatgtggcaacatgtgcttgtttctgcttcttcttcgctaggaaattatgtgccatcatcggaaaaagctccagaagcaagacctctttttcgttctcagccaattggacaccaacttcttctattacgggattctcctgcatttcataatcggaaggatcataggggacctcatcccgcgaacccgtaatcttcaaacgaaattccggatcaatcggaaccggcgtctttccatactctccttttaccagagcgacgaattggttggacggattactgtacatcggacgtcctttcagttgatccaacgcacacgatactgcttgagccccgatgatctggcttgtcggcgttaccaaaggcggcaaacctgcatccatacgcacctgggggatcaacgacattgctttttccaacaagtccaactgtcctaattgcttcaactgagctaccatattcgtatacattcctcccggtatctgtgccttcttcaccagttcattcggttcagggaaaccaaaatattcttctatggcacggcagaagataagcaaatcttcctctttgtctttccgggctgcgtcgatcgcatcgttaaaaaaacggtcgatctcagtcggtattctgtctgtcaaaggattaaacggcttaggtagttgttttgccatatcgaaaacagacaactctttgcggatatccaacagatgagcattgattttcgcgatcgcctccatattgatatccagctcgatccccattttcttacagaacacgtacaccagttcgattgccggagcagccgttccaccggcgaaataccagatattggtatcgacaacatccaccccgttgacaatagcggccaaaaccgaagccagaccatatcctggcgtacaatgagtatgaaaatctaccggaactttgagatgttttttgaacaaacgtactatttcagcgcttcttcccggtggaatcaggccactcatatccttaatcgtgatcatatcggctcccaaagcctccatttgaagcgctttatccaagaagtattcatttgtaaaaacaggcttatgcaacggatgcccgtgtaaagctgcgacaattctttcaacagccgagtgatacggatcaatcgtgtaacagacggcacaatcagccattcctccgaagcgttttacatatttgactgtcgattttatattctccacatcattcagcgcatcaaatatgcgcatgatatccaatccggattctatagaattgcgacagaagcctttaataatcttatcgggataaggattgtaaccaaacaagttacgtccgcgtgaaagggccgtcaacttagaggtattccctaccgaagcttttattttctccaaccgctcccagggatcttctcccaaatatcgcatgatagaatcgggcacggcaccaccccatatttccatcgcataaaaaccggcttccctataaaaaggaagcactttgtctatctgtttttgtgacattcgcgtcgcaaaagcagattgctgaccatcccggagagtcagatcccgaatcaaaagttttcgtatcatacctaataatttgtttagaccgtttcagacttaaatctatctttataacaaaaattaaactgttttgattggaattaccgggttaagaatagcaaatgtttatgaaaacgaccttaccgacttatctttttaacattctctttccaataaagaaggaagcgatcatgccatgggaggatacacaaggtaatccactggattataatcagaaacagtgcataaaatctcctcaaacaaggcagataaacagctccacatccccgttccggtttcacgtagatccgggtctccacctcctccacacccggatctcccatgcccttccacccgggtctggagaaacttttcaagttgtttttgcctaaaaagtagcttgtcttcatgaaaaaacgagcctatttaatctgttttgtatcagcttcagaacatatccatcatttgataaaatactgatatataatgccttattacttttcacccatgatagttatgatagatgaatgatagttaaaaaccaagaactatcatagaataacatactgttttacaatcacataaactcaattatgatagtatgatagttgttttgctaaagactttatatagaaatgcccgtgctaaagacaaggactgattgcctctatttggaataataaaataaaaactatctttgaggattcattacaataaaatcaaaagacaaatggcaatctcaagtataccatctgacatattccgaaaagcagaagagacagatatcgaacgaatctggcaaatcatcggacaagcaaaagcccaaatgcaacgccttggaagtcaacaatgggacgagaactaccctgcaatcgaacatatccgtcaagacatacaagacggaaacggatacgtcatttgccgggaagaccgggttgttgcatacggagtcatttcattcgacggtgaacctgtctataaagatatagaaggcaaatggtcgaacgatctgccttatgtcatcgtccaccgcctggccattgccgacgagatgaaacggcagggcatggcaaaacagtttatgttgcaagcagaagaagtaagccgaaagaaaggtgtctacaatttccgcgtagatacgaaatatgacaatgcttatatgcttcgcctgatcgacacgttgggattcaaatactgtggcgaagtgtattaccggaacaacagtgcaaggaaagctttcgaaaagacgatccgcccttactcccacccgataggcatttccgattatacgatccgggaagcaacttttgaagatgcaaccctgattttcgaagcgattgataaaaaccgggaagatctgcgcatctggctgccttttgtcgacgggctcaagagtgttgcagatgaacaaggattcctgcaatccgtattggctgtcccttacgaacagcgcgatccggtctacattttggaacaaggaaaagctatttgcgggctggccgggttccacttctccgatgcccctaaccggcgaacggaaataggctactggctgcttcccgcctaccggggaaaagggatcgtcacgaataccgtccgttatctctgccaatgggccgtgcgcgaacggaacatgaaccgcatccaaatccggtgtgccgtcggcaacattccgagcaacgctgtcccgaagcgattgggattcacactggaaggtacggaacgggaaggcgaattactgacttccggtgaatacgtgaatgttaatgtatatagtatattaaagaaagaaatagaacaatggaacaggaaatccaattaaacgagcacaacaaacaggaatatcctcctatgcatacggctgaacatatattgaaccagacaatggttcgcatgttcggttgccctcgttcgaagaatgcacatatagaacggaaaaagagcaaatgcgactacgaattgcaggaagaaccgaccgccgaaatgatggaagaagtagaacgtcggataaatgaggtgatcgaccggcatctgccggttacaatcgaatttgtgccgaaagcggaagccggaaagatcgtcgatctcagcaagttgccggaagacgcaagcgagacattgcgcattgtccgcatcggagactatgacacttgcgcgtgtatcggagcacatgtcaataacacgtcagaaatcggacatttcaaaatgctcacatacgattacaccgacggacggctacgcctgcgtttcaaattaacagaacgataaataatgagaatatgccaattcgtaaaatgtgccgatcaacaggagtttcctattcatcggcacattttacgaattggcatattatttaccttgaccgtacttctttcctcataaaagagacatacgacaaagcaaaacatacaactgtcgcagcaatcaatccggtcagttgcggccaaacgaccaaaaggctctggccaaaaggcaacgggcttggaatcgcgccatgcacctgctccatcgtcagcggccccaaactcctcacggaaggcatcagcaatgtcatcgtcgcttcattaaacaactcactcggtgcaaaacgcagcaaattcaacataaaccgctggtaagcgatcacctgatagtcagaagcccaagccgaaggactcaatgcctttccgacaaggttgataatcatattatagaacacgctgaaaaacaaccagatcgccacacaagccaatgccgaagtcgccgcttgtttaaaacggattgaaaagaatatcgacaagttcaaccagaatgccacataaaagaggcttacgaacagaaagaagacgacacgcataaactcttcagccgttggcgggattccgatcgcaatcagtccgaatcccataaccaagaatcccaacatgaacagcatgatgccaattacagccagagccgccacaaacttcgcattaatcagataatcccggtgaatcggctgagacaatatacggctcaacgtccctttattttgttccgaattaatggcatcgaaccctaatgaaattcctaacaatggccctaaaaaactgataaacacagcaaaagaaggcaacgtcccgtccgaaaccgtaaacagtttcagaaaaagaaacgctccatcaggatcattcggctttatcgcttcacggatatttgtcagagccgtatacaacgaacccatacatgtcagtgcaatgatagcgatcaggataataaaacgccagcttctcacataatcggagatttctttattgacaataacccaaaaaggatgattcgtattactcatggccgcgtcctcccccgaaatattgattatagatatggtcaagcccatgctcagtcttatgcaaatctgtcagttcgacctccgccagcaactttccccctccaaacaatcctacccggtcgcaaacttgttggacctggttcagatgatgggaagaaaacaggacggtcaatccctcttcccggctcaactgccggatcagatccataaattcctgcacaccggccggatctatcccggaagtcggttcatccagaataattacttcagggctttttatcagcacatcggccaatccaaggcgttgacgcatccctttggaatatttaccggcctttttatccgcatccttcaccaatcctatccgatcaagcaaccgctctgctttcgcacgcgcttctttcctccggataccattaagggcggctgtataaacaaggttctcgattcctgtcatatcctcatagaaacccacatcctccggcagatatcctactttgcgcttcacttctatcggatgagtggtggagtcgatatcacatacctttacggaaccagttgtcggttcggtcaggcccagcatcatcagtatggtcgtcgatttccctgccccgttcggccccagcagcccgaatatctcacctttgcgaatctgcaaattcaagtcgttcacggcagtaaagtctccatactttttcgtcaaaccggtaagttcgatcacatactggcacatgacttacctccttccatatttacggaacagataatacacaccgcccaacacgagcataataatcaaaatccccaaccaaccgtaaaccatgggagtatgaacggatatgcggaactccgcagtcgtattgacttcaggcgtcttggccgtcatcttcgtcacataatcgcccggaagggcctttccggatgcttttatcgtcgcagtaacattcgtcgtgccaccggccgtcagtttctctattttagaaggttcaaaggtaacttcccagtcaaccggcttagaggctgtcaactggacatctttcagttcggcagacccattgttgcgtacgagcagatcaatgcgtttcatatctcctgctgtaatctccgcgctcaacaatcccctcggagtcgtcagctcgatatcataggaaccagtgacaaccacctccaactcgatatcggcagaggtcgaactagttgtcgcacggaccggaatcttataagtgcccgcctgcacattagccgccggattaatatcgatactgatattttccgtcgcattggcttccacttgtgcagaagtggcttgcttgcccgcaacccggaaagtgacattccatcctctcggaacgtctgccatcaatgcatatagctgctggtctgctgtctgatttttcaacgtcgtgttaaaattgaaggttgatttcgaattgccttgcatattgggttgctttgtcacaaattcagtttgataagttccctgttcggatacagtcacagtcaacggcaattccgccacgccaggggcagtcagcgtaaaatggtacgttcctttatttactttaaacgggacatccaccttgaaagagaaattcttcttttcacccggcagaacggatatctgatcgactgtccaacctccggctttcatctcatacttccaacctcgcggcattcctaagacggaaatagaggcattcttcacttcgtcacaattattaatgacgtcaacactgtaattgatagactctcccggcggaaccgcaatcttagtgtagggagtatacaacatcacacattcatcagcgccatatgcgcgtgtactcatcggaaataatacaagtacgagtacaagtaatagattaagatgattcgttcgcattactataaaaaattttagtacaaaattgtttatcaatagctggcgacaaatatagaagtcttctttattactgtctattaaaagtattaaaaaaaaattacaccccctgctccccacttccccatatgttttgaccgaagcgtaaggaagttttacattcaagccaataattatagaatatgaaacaacgaaataaaatatttttatgtaagtttgcgtccgctaagcgtgatattttaatatagaacttaaatataagagttatgcaatcaattgacaatttcaattttgccggcaaaaaggcatttgtaagagttgacttcaacgttcctctggacgaaaacttcaacatcacagacgacactcgtatccgtgccgcccttcctactttgaaaaagattttggcagacggcggcagtgtaattatcggttctcacctaggacgtccgaaaggcgttactgacaaatattcactgaaacacatcctgaaacacgtttccgaactgttgggtgttgatgttcagtttgctaacgattgtatcggcgaagaagccggtgccaaggctgccgccctgcaaccgggcgaagcattgttgcttgaaaaccttcgtttctatgcagaagaagaaggcaagccgagaggtttggctgaagatgctacagacgaagaaaagaaagctgccaagaaagccgttaaggaaagccagaaagaatttacaaagagattggcatcttatgccgactgctatgtaaatgatgcattcggtacagctcatcgcgctcacgcttctacggcattgatcgccgattacttcgacactgaccacaagatgttcggctacctgatggaaaaagaagtaaaagctgttgaaaaggtattgaacgacatcactcgtccgtttactgcaatcatgggtggttccaaagtttcttccaagatcgaaatcatcgagaacctgttaaacaaggtagacaacctgatcatcaccggcggtatgacttacactttcacgaaggctatgggtggcaagatcggtaaatcaatctgcgaagatgataagctggacctggcgctcgaccttatgaagaaagcaaaagaaaaaggtgtaaacttggtattggccatcgacgctaagatcgctgacgatttcagcaacgatgccaagactgcttatgctgacgtaaacgaaattcccgacggatgggaaggccttgatatcggtccgaagacaatcgctctttatgccgaggttatcaagaactccaagacgatcctgtggaacggtcctaccggcgtattcgaattcgaaaactttacagacggttcccgtgcagttggcgaagctatcgttgaagcaaccaagaacggtgcattctcattagtaggtggcggcgactctgtagcttgtgtcaacaagttcggcctggcaagcggcgtttcttacgtttctacaggtggtggcgctctgctggaagccatcgaaggcaaagttcttccgggcatcgctgccgttaagggcgaagcatacaaataagaataatccttatccataaataaaaggctacttctttcggggagtggccttttttgttccatacaattttatgcttatctgtacgttctaagaaagaataaacatccggaaatgtcttaatcagataaacggaacaaattacctatttttatgaaaacattatttttcgtgttatgcctcttcctttctgtagaaggagcactgagccaagaaaccggcaaattgtatacaactctttccgacctgctaaacgaaacaagcagtagtacattgaacgttattaaggaaaaacgaaacaaaaaacaactgttcatgtccggaggaggagacttcaaaatatacaatggggacaaagaactcgataaggagatcaagaaaaagaccttcgccatcgagattgatgacacgctgtacatcaattgcatcggattaaaattcaaaaagcgtccaatcggagcctggtttgcaccaggtcttatttgtaaagggaaagtttatttcacagcaattcccacaggttcaaatgctgctatggcattcggagtcgttggagcagcagtacaatcagctaatgcagcttcatcacgtgttttctacgaagtagacgattccgaaaaaaagctgaaattagacagggtggattcgaaaaaaatggaagaattattacaaagatatccggaattgctggaacgataccaaaaagaagcatttaaggaacatattgaaattgtaggcaaatatttgcaagcgatcaagcagcaggaataataagtacaaatatttttgtacctttgcacgtcatatttggaatcaataagaaaaaaacataagaattataaggaaatggcaaaagagctgaaagaactgactccgagaagtgtgaactactcgcagtggtaccaggatctggtaatcaaagcggatctggcagagaattctgcagtacgcggctgtatggtgatcaagccttacggatatgcaatttgggaaaagatgcaacgtatcctcgacgatatgttcaaggaaacaggccacgtaaacgcttacttccccttgctgatcccgaaatcattcctgagcaaggaagccgaacatgtagaaggcttcgccaaagaatgtgccgttgtaacacattatcgtctgaaaacaaatcatgacggtacaggtgtcgtggtcgacccggccgccaagctggaagaagagctaatcatccgtccgacttccgagacaattatctggaacacttatcgcaactggattcagtcttaccgcgacctgcctatcctttgtaatcagtgggcgaacgtgatgcgttgggaaatgcgtacacgcctcttccttcgtaccgcagaattcctgtggcaggaaggacatactgcccacgcgacacgtgaagaagccgaaatcgaagcaaagaagatgcaaggtgtatatgctgactttgcagaaaactatatggcgatgccggtcgtcaaaggtgtcaaatctgcaagcgaacgtttcgcaggtgcattggacacctacacgatcgaagcgatgatgcaggacggaaaagcgctgcaagctggaacttcccacttcttgggacagaatttcggcaaggcgttcgacgttacctttatcgacaagaacggaaagagcgactacgcctgggcgacttcatggggggtttcaacccgtctgatcggcgccctgatcatgtcccactccgacgataacggtctggtattgccgcctcacctcgctcctatccaggtggtaatcatcccgatctaccgcagcgaagagcagttggcgcagatcagcgaaaaggtaaacggcatcgttgccaagctgaaagcgttaggcatctcggtcaaattcgacaatgccgacaacaagaagccgggatggaagtttgccgaatacgaactgaaaggcgttcccgtacgtctggctatgggcggacgcgacttggaaaacaatacgatcgaagtgatgcgtcgtgatacactggagaaagaaaccgtaacttgcgacaacatcgaaacatacgtccagaacttgctggaagaaatccaaaagaacatcttccagaaagcactcgatcatcgtacggaaaagactattacagtcgacacctacgaagagttcaaggaaaagatcgaagagggctacttcatcatggctcactgggatggaactcccgaaacggaagagcaggtgaagaacgaaacgaaagccacgatccgctgtattccgctggaaggcgacaagactccgggcaaatgcatggtgaccggcagaccttccgcacagcgcgtattgttcgcacgggcttactaaaccgtccgtacatacaaaagaaaataaagttccataagcatgaaactcttgttccatgcttatggaatttttgtttcctaccaatgaaatttttatttacctttggggaaactaattggagacctgttatggatttaattcttcctaccaatcaaaatacttcagcccccgttacccttgacacgaaagtgctggtcgtaatcggggctaacggagccggtaaaagctccttcggcagaaacttacaccaacgctacgccgggcaaagcgtatggatatccggaatgcattccctcttccttagcagcgaagagaacaaggctcctgtcaatggcaacgagctaacacgacttcagtccatgattgcggagcgacttttcataccacgtatgtcagaatatgaaaagttgatcctgcacctgcaaacagaagaatttgaagctgccgtccagtataaggaagaaagcaagctgacacccgatctattaccgccggtcaccaagatagatcgtatccagacgatttgggagaagatgttcccgcataaccgcctggtacgcaaatcgggttttattgaactggcctccaccagcatcgacggagactcttatacggccggccggatgagcgacggcgaaaagctggtattctatctgataggagccgtactctgtgctcctgaaaatgcattattaatcattgaagagccggaagtcctgctccacgactccatcaaaaatcctttgtgggacgaggtagaagccatgcgcccggactgcacatacgtgtatctgacgcacgacatcgacttcgccgcctcccgcgacaacagcaagcgcctctggatacgttcttacaatggagacgcccagatatgggactacgaactgatcgaaaacaatgacagcttcccggaagaggtctatatggagatcttaggcagccgcaaaccaatcttattcatcgaagggaccgactccaacagcatagacagccgcctctacccgcttatctttcccgactacaaggtaaaaccgatgggaggttgccagaaagtaatcgaaacaacaaaggcattcgcccagttgaaagatttccatacgctggattccaaagggatcgttgaccgtgaccgtcgcacggaaggagaaatagcttacctgcgcgaacagcatatctatgttcctaacgttgccgaagtggaaaacctgctgatgctggagcctgttatcaagaccgttgccgcccgtctgatgaaagatccggaacaggtcttcagccaggtcaaagaaaacgtcatcaagcttttcctaaaagatctcgaaagccaggttttgcttcatgcccgccatcgcgtacagaaaaagctggaaacggctctgaaccggaagatgagtacggtggatgaactgaccgaacatgtggaaagcatccacaacaccgtacatgtagacgaaatatatgcgggaatcaaggagaaattcattcggtttgccgaaaccggagattacaaaaacatccttcgcgtttacaatcagaaagggatgttgcctcagtcccaactctgcaaatattgtggtatcagcaataaggagagttatttaaacctcgtcctttccattctgaaagagaataaagaagatgcgattgtcatccggacttccatcaaagaatgtttaggaacataaaaaagtttcccgaaatgaacaaaaagtccgtaaaaagtcgttcttttgtaacttagaaaaatatatgcaacggggcggaagctccttaccgatttaaactatgcgcacacctactcttcaatatctttatctgcaaaagccgataacgatggttattgtcatttgcataatctcagtccttccctggatcgggctgggagatttttcgactaagggagaacctcgcgaagcggcggttgccgtttccatgctcgaaaccggcaactgggttttgccacaggtctatgcgaacgaatttgcctacaaaccaccgttggcgcattggctgatggcagccgcttccctgccgcagggatatgtttcagagttcacctcccgcctgccgtctgcgttggcttttattatactgatcggtttcacactggttttctttggcaagcggttgcggttccagcaggcattcatcgccacgctattgctcatcacctgtatcgagatacaccgggctgctatgaccacgcgtgtggacatgctgctgacaacctttatagtgatcgggctttatcagctatacaggtgggaagacaaactggagttaaaaggggtgccgatcgctattccggccttattgggatgtgccgtactgacaaaaggacctgtaggtattattctgccgctatttgttttcggtgtctatttgctgatgcttcgtaaatactcttatttagtgatattcaaagcacttctttatgctggtatttcttcgatattcctgcctctattgtggtatgtcgctgcctggaaacagggaggcgatacgttcctgaatgtaatgttagcagagaatttcggtcgtttcttccacctcagcacgcctgatatccattacaatttagggcatgaaaacggagtctggtataatttcatgacactggctgcgggatttgttccctggacgatcttcttctttttctctttattcggattaaaactgcacaaaccagaaaagtcggtgaaagagatactggctagcacttggaataatattcgatcgatggaaaaagagaaactgttcagcttagttgcattggtttgtataattttcttctattcgataccttccagcaaacgaagcgtatacttgatgccggcatatccgtttattgctattttcttggctcaatatacattatacattacggaataccggacgaaggtaacccgagtatttgccgctttcatggcctccattactgccgtcgtcgtgattgccgtcgccctgacaatggccggagcaatcgatcctgtcaagatcgcaagccagtacacaagccgtcaatcgacactggaaacggtcgagttggtgtcgaatatgttcgcgtatccctgcgggctgacaatttgtatcctgatagtccttttggctattctggcgactgtctattatcagatgttcaagaagatcaacatcaagatcctgtatgcgacgattgcattggcctttgccattaacttattgatcgatggggttgtcatgcgcggtatacgccaaggaagctccgcccgtccgtttgccaagcaggttcagaaagaatatccgttggacgacatgaatatgtatgtaatgaatgatctgaagacatatgctaatctttacgggctgaatttctatttgggcaacaagttccataatttcgggcaggaacagccggtaagcggcttctttttctgtaccgtgaaagacttggaaactgtacaaaaaaattatggagataagtacacattcagtctacttacctccacaaagaatgttattgccgacgtacgtcaaagaatcgtactatgcagcttcttacgaaacgaataatcaatatttaaagactttgccaccggcaagcacttcctgtcttgcttcatcgaatgtagctttttctcctgtccgaagagaagccgtacacatgatgttggcaatagaatgattatagccggcatctaccggagcattcggttgcttgcggcttttcacgcattccatccaattacgcatatgcaggtttgtcattgtatcggctcctgtattggaacccgtttccaccttgatagaaggcaatttgaattcttccaacaggttcggttgcattcccatttcatctgcgaaacgcttggtcaatccaccttccgatgtcactttattcgtgtccagattcaacgtaccgccattggagaagtacaattcttttgttccgcctgccgagttatgcatacgggaagaatatacgacctggaaattttctccggctttcccataatcgaacaccgccgtcatcgtgtcataactgcggcgtccgtcattccattgatatattccgccattggcagcaacactattcgggtggttgcaacccgtaaaccaatgtaccgtatcgatctgatgtgacatccactggccgggaataccggaagaatacggccagaacaggcggtattccaaatatttacgcgggtcccattcttcgtacggacgattcagcaggaaacgtttccagtcagtatccttctcaaaacattgtgcaaccaaagccggacggcgccaacgtccgggctggttaacgttccagcacatttccaccatcgtgatcttgccaaacttaccggaacggataaagtcgttggcagcatgatagtttggggccgagcgacgttgggaaccaatctgcacgatctttccactttccaacacagctttgcgggcggcacgagcatcttccatcgtttcagcaaaaggtttctctacataggcatcacatccggcttgaaccgcttcgatgcagtgcaaggcgtgctggaagtcggaagtggcaacgatcacggcatcacacatttttgcgtcatacagttcttcgttgttacggaatgctttcactttctttccatatttctcctggaagaaagcaacaccttcttctctacgccgtttccaaatgtcggaaatagcgacgatttcaaagcctaactcatcggcacaggccataaaagcaggaatcaaagaatggcgggcacggtctgaaaagccgacgatacccacacgaatcttctcgtttgcgcccattatgttagcaaaactctctgtactgaatcccagtccgccaatagtcagacctgctgcacctaaggcactgtgtttaaggaaatctctacgtgttgtcatggttcctattttttagttaactatttaagttctctaatcttgatattccggaaagagacttcgtcccagtgatcctgcaaaaggatatgacctttttcagcagtaccgaaaggtccaaattcggcatattccttcttcgcgaatttgcttcccttcacgacttccaggaatgcatccgaagcccaatcatactcaacggtcttaaagccgttcatccaatgttcgacatgtttgttagggaatactttgataactcccttattccactgtccgacaccattgaagcgtttgtttttcgcagggataatatcgtacaagctggaaaccgtacggctaccaggataagtcgtgtacagtttggcatccggatgttgtttgtcatccagaacctggtattccggaccgatcacaaaacctttattcttcttgctttcctgaatcagatatttcataccgctatttgcaccttccgtcaacttgaactcaaagctcagctcgaaggcaccaaactcatcgactgtcaggatatcaccccctcttttgccttccggaccgccattcttcataacagtcaattcaccattttcaatcttccatccgttttcagggaatgtttcctgtccggcaccccgccatccgttagaagtcttaccgtcaaacaacagtttccaaccagccgctttttctgcttctgtcagcgtattcggaatacagttcacttccggagctaacgggccttgcatgcgctctgcctctaaattttccgtcttaatacggatattacgccaccaaatttccttgccgacattctccgttttcccgaaaataccatgtacctggaaagcgataaagccttccggtgtcatatcatctactacattcgaagtgttcacaccattcagccagatgcggatactgttgccgatagcttcaattcgatacttgttccaatcatctttcttataggcggctcgtccagcttcgttattcgttaaaggagccagccaaccgcgtcgcgcttcatcataaagcccaccactccaagcacggtcggacgggtcaatttcgcactgatagccatgcacacgtccattgttgtaatccggcttactttcgcttcgaaactgcaccccggaattcaagtctggatgacatttcacttcaaactccagaataaaatcaccatacgtttgttctgtcgccataaaactgttcggttctttatccacagtctggccgaccatacatccattctctacacgatagggagccttaccattcaactgcttgaagccagtaaaatccttaccattaaacaattgctgccatccgtcgttaggttggcaggcaccacacagcaaagtcagagacaaagctgctaatttcaaatacgctttcatttgctttctgatactataattagttagacaataatttcctttagttaacaaacatgtgtacgtgcacaaagatataagtttttgcactatcattgcattaaatctcaaaaaagttagaataactacactaaaatagctctttacaagccgtctatttcccactctccctgctattattttaaaatcagagtcggcgattatataatcactgcagccaattacatagtcgctgccattgatttaagaataatatggcagtaaggccattttttattacgcaataaaagaataaagtaaataagatttacaaatttgttctcctgtatcccaataagaagtatatttgcagacaaatgaccttattataaacgaattgatttttatgaaacaacagtttatgaagactgccttttttgatttcgacggtgtggttgtagacacagaacctatttacgatatttactggaatgaagcaggaaaacgctatcagacgggaatccccaatttcgcatcccacatcaaagggacgacattaccttatatattggagaagtatttttccgaccgatctgaagaatttaaggaaaaggtaatccgcgaatcaatggaattcgaacagcagatgccttttccaccggttccgggtgcgatggagtttatccatcttctgaaaagtaaagatgtaaaagtcggtttggtcaccagctccgacgatgccaagctaaaacgggctttccgccttttgaaactcgacaatctgttcgatacggtcgtgagtgccgaccggatcacaaaagggaaacccgatccaatgtgttatttgcttgccgcctccgacctgcatgtatcaccttccgacagtctggtatttgaagactcttttgccggaatacaggccgggaccaatgcgggtatgcgggttatcggacttagcacgaccaattccgaagagtctttaaaagacaaagtttatcaggtcatacccgacttccaaaacattacgttcgaagaatacaaacagtggtagaacggacataaaaataaaaaggggatgtgccgccactccccttcttattgtacaaaaatccgattacttaaaaattatatccgacacggacagccaacgctgcggcatccaaatcctttatgatattatacttggcttccaagccgacagaaatccgatctgtcgcatacacttcacctcctaagccgatattggctccaaaacgagttgcatcccaaggacctgctttccaaaacgaaaggcttaagcctgccaacggataaaaaccgaacatctcactcaatttaaatacataatgagcattcatatcaattgcccatgcacttaacccatcattctttactaaatgagtaatagacggagtcaaacgaaacgcatccgttacacaataacgataatcgatgccgatagtagcattgccgacatcattaaaattataacccaagttgaagccaaacgaggattgaccttgctgcgtctgtgcatatgcacctatactaaacagcgtcaacatcaacataacaattaattttttcatacttttcttatttagtacaacaatatctatcgccaaatatagtatttttccttaacaaaagcatattactttacttttaatttatcacctgcactttttacaatgctacgataatagtcttcatcatagccagggaaatccggatattcggataatccgtaaccattctgcttaaaatgtccgttttcttccttcttcacgttaccatccatatatttgactaacaagtattctcctaatttcttccaacgggctgttgcctggtcggcagtagtagaactaaaccaggtcaggaacttgaccgcttccgccggattcttggcatacagttccgatgcagccttatcgacagccggaattgtctgttgatagctgttctccaactcctgctgaacaagacggatatcctgaatcatataactatatttgccatacgccatattagccacccagttatgaatccagaaagcggatgtccaagaaaaattcatcatatcaccgtttccgacacgataacattcgggagaagctgtcatcgaacaatagatcggcgtaaagacagccatgtctgcatcatccacaccgaaccaaagaataccaccgacggcatccggtagccaattacgcatctgaggaacaatcacaaaaccggtctgctgcgtagcaatcgcacgctcgttcgtatattcctgaccgtccacttcgaaagtcatcggacgccaacgatacggaactttgtaaggacctgcaccggcatccttcgtcatatctaaatcagttccttcgaaatggtcgcgcataccgttctgcacatcccgaacggataacaaacgatcaggctttacatacaaaggcataggcttcttcattacatcgcccttaatcagatccatatattgatccatcgatttatcatatttgcgaaagaaagaccacacacgggcttcacaaccacgcagagcactgaaatcatacgggcaataggctttctggaaactaaaatccttatccctgccactgaaatatcccttttcacgagcaaaagagacaacatccggtgaataaatgcagttctccttatcatcaaacgggatctgctgaatacgagattgattggcatgagccgaaatacaatcgtccggaatgcgaatagcaacccagacagctcctttattacccggacctttaccgatcatttccatcacccaagcttcgttcttatcagcaatagagaacgtttccccactgctatagtagccataatccttcaccaggtcagtcataatccgaatagcctcccgcgccgtcttggaacgttgcaaagtgacataaatcagactgccgtaatccatgataccggtcgtgtcaactagttcgggacgccccccgaaagtgctttccgtaatcgcaacttgatgttcattcatattaccaactacagaataggtctgttcaacctgcggaatctgtcctaacggtttatgggtgtcccactcgatgatatccaacatcgtccctttcggccaagtcgcagccggccagcgatacagttcaccatataacgtatgcgaatctgccgcataactgatcataacagagccgtcaaccgaggctttctttcccaccagtagacctgtacatgcaaaggcttccattccggaaagcataatagcacaggttaccatcaaaatccatgtttttcccatataaataaagtttatgcaaataataacatatatacgccggcaccgcagcaatagccgatcaacgccaaaattgaaaatcgtttggtataatacataaaatcgatcttttccaatcccattaccgttacacctgttgcagaaccgataatcaagatactaccgccagtcacggcacagtaggcaaggaatgtccagaaacctccgtccgatacaaagaactgagcataaggagtcagattggccgcatccggtacaatcggatacatacccattgttgccgcaaccaaagctacgttgtccacacaggaagacaaaacaccgatcacaaagctgatcagataaggttcatgtacatgcttatccagaaaagcagacatcaaccctaactggccggaggtttccaaagcccctaccgccatcaggatacccaaaaagaaaaagatcgtcgctaggtcgatgttcggaagtaactgagaaatacgtaacttattagattcgtgcatatgcagtttgctatacatgatatccgtataaaaccacaggaccaccaagcccaacaaaacacctaagaaaggtggaaggtctgtcatcatctgaaagaccggaaccaaagccaacgaaagtacaccaatcacaaagatcacccgacgcgaatgattcggtatttccggtgcatattcgtctgccatttcttcctcactcatcacacgtaaagtcgcatctttcttaaacaaccaaaaattagcaatcgtcagaggcacaagcaagtttatcaatgccggaaagaatacatgcgaaatctggtgcatagccgtgacgttcttgcccacccaaagcaaaatggtcgtcacgtcaccaatcggagaccatgaaccacctgcattcgcagcaataatcaccatacaagcatatttcaaacgatctgtccggtccggaaccagtttccgtaacacggccataatcacgatagcagcagccaagttatccaacaaagcagaaaagaaaaaagcggcaaaacttatataccacaataatttccttttattggcagtacggatatatccggtaacagcccggaaaccaccatgcttatccacgatatcgacaatcagcatggagcacatgacaaagaaaagcgtttcggatacattccctaaatgataaacaatcgaacggtttgtaataaatgtaataaactgatctttcagaggagcatttgccatttccgggttttgggtcagaaactcctgaaacaaaggactggagcgttcgacaaaaatatcataggcgtcaaacatcaatatcatccatagtgatattgccataaacaaagctatcgcagctttatttatctttatcttatcttccagcgcgattgcaagaatccctaaaacaaagatgacaggcattaaaataaacatagtacaatatatttaaatttattatcaaatcacaaaagaaagaatttttcattccaagctcttgcataccaaaaagcattataaattttagttaaacaaaagaatagtctgaaaagccccctcctttcgtttttattatatagaatacagatattctatttcttccgaccaaatagactcatccggtgtttccagaattaaaggaatgttatcaaaccggggatcatccatcagcatcttaaatgtagtcaatcccatcactcctttcccaatactatcatggcgatccacacgggtagccagatcttttttggaatcgtttatatgcatgccacgcaaataagaaaaacctattacctcgtcaaaatgtcggaatgtctccgtaaaaccttcgacagtcttgatatcataacctgcagccaatgtatgagcagtatctatacaaactccgacacgggatttatcttccactttatcgataatgtaagcaagttgctcaaaagtatatcccagattggttccctgtccggctgtattttctaatacggcacatacacccgaagtctgatccaatgcccagttaaccgaattagctatgcgcgtcagacagtcctccacctccatctggttcaaatgacttccaggatggaaattcaaacgattcaatcccagctgctcacaacgttgcatttcatccaagaaagcatcccgtgacttctgcaaaccttctgcttccggatgtcccagattgatcagataactgtcatgcggaagaatatattctgccgcataaccaaattcctcacaacgctctctgaaaagagaaatactcttttttgtcagcggagaagatttccattgacgctgattacgggtaaacaaagcaaatgccttcgccccaatcgcattcgcattcactggagcattctcaactccacccgatgccgacacatgtgctccaatatacttcattatgttatttatgttttattgtttattcaccttctgctttgcatcctgcaaaatgaaatttttctgtcgcctgttcttgtgtaactataaaatagaccaagtcggcacgcgtacataactcatcttgtgaattatagatctccgtttcaataaagattgcatttcgtttacggtctttgatacgccccctgattgtcagcctgggctcacaagtagaaagacttttcagaaagcgggcatccaagcgtgaggtcattcctgaagtctgtaacttcctaagcactacccaacctgccaattcgtccatcaatgttgtcaggattccaccatgcaacgtattcaaccacccctgataatgagcttccggctcccaataagctacaatatcgtcgccatcctcataaaactccatatgaagtcccatcggattgctcggggcacagccaaaacacatatatccatccaatccttcccagggattaataatctttttcatatttgataatttttaccacagccctattaatttacaaaggtaacaaaaaaagcagaaataaggtttattaaaatagcgccgcaacaaagctgtaaataaaatagccgcaaaccgacactttcaccaccacactgaacagaaaaccgacaaaagcccctaacccggctttaaaagcctcggcagacttcttccctccaaacaattcgccaattacggctcctgcaaacggaccgatcaacacaccccagggtggaaagacgaaaagaccggcgatcgtcccgatcatacatccccgattcccccatttaccgcctccactgtattttgtgcccaacatgggcgtcacataatccatcacctggacaataatgaccaaaaaagcccataaaatcaaatgtgtagtactgaaatggattttgtccgtaaagtgcaaaagcaacaaacccacataagaaacaggcggaccgggtaatacaggcaaaaaacaacctgccagcccggccagcaaacaaagtacccccaaaataataagaaagatatccatatagttatattttagctgtataagtattcatatgcaataatacgaaaaaacacgaaaacagtaaaatataaatccgaatcgttttcccctcagtgctgcctcacccaccataaacaggaacaggttggcggtgaacacttcatcctttttaacggtcgcattatccgtatctaacgaaagagaagattttcttttgcatcaggggcatgcaggaaaacggcaccaactatcgggcaactattcaactctttacagtcgccacaagtattcaatccttttttatttacgcatttacggatttcgcaataatcgctacaataggcaaatttagcaccgtctgcccgacatcccatacaatttatggttgcagccgtaatctcgggtgcgttgttcatctcactccacttccgggcagtcttttctcttaattcattgtcatttccgactgtggctatgcgagcatcacaaccttcacaatccaacccgcaacatgcaatcaattgtttcatcgtctgttataatcctttaaccattccaaaaacactactataataaaggaggtgtgacaaaattcataatatggcacacctccttttcaatatttcttttatcagagtaagtcagaagctaattcggacaattgactacgttctcctttgatcagattgatgtgagcaaacaattcttgccctttcattttatcaaccatataagcgagaccattactctgtgcatccagataaggagagtctatctgctggatatccccggtaaataccattttcgttccctctcctgcacgggtgataatcgttttaatctcatgcggagtcaggttctgcgcctcatcgataatacagaacgtttccgaaagacttcgaccgcggatgaaagccaatgcttcaatcacaagttgcccgttcttttgcaaatcatctattttacgagcatctgatccaccgggtgcaaactgtcccttaataacattcagattatcaaacaagggctgcatataaggagccaccttctgcttctcatcgccaggcaagaatcctaaatccttatttgccaaagcaacaataggacgtgccagcagaatctgtttataaacattcgcctgttttaatgcagaagccaaagccagcaaggttttaccggttccggcctttcctgtcaacccgataagttttacatccggatcattcagcacctcaaaagcaaaactctgctccgcattgcggggctgaataccataattgctggctttttccacttttttgaatttattggtgaacggattataacgggccaggacagaattacgcacactctttaaaataaaacattcgttcggctccagcttcgactttatatcgaacagatcagcatcgatgccatcaggagatgcatacatcttatcaatcaaatccggatctatattctcgtaaatgtcttgtgcacgtttgaaaatatcgacattaatgaccttgtcggttatataatcttccacttcgatacccaacgaacgcgccttcatacgcaggttcacatcctttgtcaccagaatggttttcaccttccggtctttttcagactcagcaaccgacagcgtacacgacagaatacgatgatctgcggttttttccggaaacgactggtaaattttctcctgatacttgtccccggtcaccacatgcaaagtgcctttgccaggtcccagtgaagctcctttcaaaaagaggtcattgctggtcaacgtatctaactcgcgtacaaactcacgggcattgtagttgatctggtcgctcccctttttaaacttatccaactcttccaacacgacgatcggaagataaatatcattctcctgaaagttctcaatacacttgtagtcgtgcaatatgacattcgtgtcaagcacaaaattcttctttgctcccatgatctttcgatttaatgattatgcctctaagatagaaatatttccgagatattatccctcgaaagccaagaatatatcaaatagaccaattaattccacttttttacaaaaaccaaagatcacgccccgctttatttatgtatttttgcaggtgaaatgtcgaaattaaattcatgaaaaaatacaaacttatcacatacatgttgctgtttgccggatgcttgtcggcgcaagataatttgtcagcattgcttcctatgccgaaccaagtcaaacaaatcgaaagtaagaaagatttcatcataagcggaaagacgaccatacaaacgaatctgccagaggatgctttttgcattgcagagttaaaagacatcttgagacaaagaacagggaaaacaccaactctatcctcttccggatccggcagttccgtcattcgcctcatactggatccttcagtcaaaggagatggacattacctgttatccgtatccgagaaaacagtttccataaaaggggcaacacagggttccattctgtacggacttatgaccttagatcagattctgttaggagatgtatgccgaactttatcgggaaagattgcaccaatcgaaatcgacgatcaaccccgtttcagctaccgttcattgatgagtgaggaaaagattcttgtttctggaacaaatttcttcacccaagcggataatttccgaaatcggctcaacaaactgatggttacttttgaaaacttaatgaatattcctacttttacaaccggattttgagaaaccaatatcaacaaatacattaaaattaaacacataacaaatttatgaaaaagattttcagcttattgttagcggcctccgcgtttgcgtgcacgcaagagaaggtggtcgagataaccatcagtaatccgtctaccacagaccgcacaaacgaaatcaccgaaatcacttcggacgccatcaccaaactgaagggtgagacattcatcatttctgacaatacaggctcgcaagttccctatcagataacgtatgacaacaagattatttttcctgtttccgtcaaggggggtgaaaacgtgacctacaagatcaccccaggaacacctgaagcgttcaaaacaattgcctgcggtaaacaatatcccgaacgagtggacgatattgcctgggaaaacgaccgtatcgccttccgtacctacggtccggccttgcaagctaccggcgagaaagcttatggttgcgatatttgggtaaaatgtgtatccgaaccgattgtcgacatgcgttacaaaaccgaactagatccggaaacaagagctaagattgcagaactgcgcaagaccgacccgaaagcagcacagcaattgtccgaatctgtttcctatcatatcgatcatggtaacggattggattactataaggtaggcccaacattgggagccggaacttccgctctattagcaaacgactctatcgtctatccgtattgctacaaagactaccaaattttagacaacggtccgttacgtttcactgtaaagctggtttacaatcctctgactgtgaaagggaacaataatgtgatcgaaaaccgcataatttctctcgatgcaggttcccaaatgaataagttcacaatcacttacgataatctgaccgaagcgaccccggttgtaaccggtatcgttttgcacgagccgagcaaagactatcaggccgatacagcaaaaggttacattgcctatgccgatcctgctgatcccgtaaacggacaaatttatgtagcagccgtattcccggagaaggttaacgaagctaaagctatcacattctccgacaaagaaaaggctgaacgaggcgcagacggccatgttttggcttacagcacctacacccctggttgtagctatacatattatagtggtgccggttggagcaaatggggatttgaaaactccagcaaatggttcgattatgtacagaaattcgcgcaaaatctgaaagagccactgactgtaacaataaaataaattcaaatccaaataaaaaagtaaaaggggacatcaaaattgaagtgcccccttttcttttatttcgcctatattttcttaagccagatcagccatttcgggatcaatataaatgaaatatccgctccatcatccgccatttctcggcagatgttgcacccgggcgggcaacctgaaagatggacatatacgtttcccactcctcctggcgaggcaaagtagccaaccgtgcaaaagcctcgtcccaatcaaaatcgaacgagatcagttcgggatcatctttcagatccaatgtctggcaataccgctttgttggtataccatattctttcatcttatatcctgtctgtttcatcttctaatatctgattataagattatttaagacctctgttcttcaataaaggctccgtgtccggttccttacctcgaaaatttttgtacatatccataccttcatcaataccgcccggagacaaaacgtatgtacgaaatttggcggccacttcgggactgaagatgtcccccgtttctttaaacgcctcgaaagcatcacaatccagcacttccgcccaaatgtagctgtagtagccagctgtataaccaccttccatcgtatgaccgaaatatgtgccccaataacgaggagcaatctgcttcaacaaacctcgaccatacatagcatctaattcaaacttttctatattcaaatccaccggaacctctttcagaacatgatagtccatatccaacaaagaagaagccacatattcagttgttgcaaaaccttgtccatatctaccactcttcactattttatcgacaatagcctgcgggatcacttcgcctgtttcatgatgcttggcataaactttcaagacttccggttcgaacacccaatgctccattatctgcgaaggaagttcaacgaaatcacggggaacaccagccactccattataatggacatcagcaaaaagtccgttcaaagcatgtccgaactcgtggaaaacagtttcagcctcgtcaacactcaacaaggcaggctgtccatctgccggtttacagaaattaaacacagtcgtcactaccggagttatgcgcttaccatccctatacgtttggtcgcgataactaccgcaccatgcaccaccactctttcccggacgggtaaagaagtccatataaagtacacctaaagatgtaccatccttgtccttacattcgaaaacctgggcatccggatcgggaagcggcatgtcctgcaacgaagtaaaagtgatgccatacagtttgttcgccacatagaaagcaccttcccggacattgttaagctccaagtatggacgaacttcgttttcgtccaagtcaaatttcgctttcttggctttttcgaaataataacgccaatcccaggcttccgcttcgaagttaccaccttctttcttaatctcggcattgatatccgccagctcttccttcgcttttacaagagcgggaatccagatcttgttcaacaaatcgtatacattcttttcattcttcgccatgttttcttccaacacgtatgcggcaaagtcttcatagcccaataatttggctttttccaaacgggcgacaaccaacttcttgattacatccttgttatcgtttgcattattgttattgccacgacaaacataggctttatagattttctcacgcaaagcacgattgtcggcatattgcaggaaaggcatcacactcggattatgcaatgtgaaaacccactttccatccagtccggcctctttagctgtagtagcggcggcggcaatcaatgtttcaggcagaccggacaagtcttctttcttatcgaccacgagctggaaagcattcgtctcctttaacgaattttgtccgaaagtcagttctaacatggaaatctgttcgttcagtttacgaagctccgcctgttcgtcagcatctaagttagcaccgccccggacaaaccctttataagtttcttcaagcagtttcttctgctccttatccaagttcaacttcgcctgattctcatatacagacttcacacgggcaaaaagtttcggattcaagctgatatcgtcactatgtttggagagcaatggtgaaagttcctgttcaagagcctgaatctcgtcgtttgtgttgacactcgcctgaccgctgaaggcataagcgaccttcataagcaattctccactacggtccagtgcaacaatcgtattctcaaaagtagctttgtccggattgtttacgatcgcctctacttctgctgtttgttcctccattccttttaggaaagcaggtttgtaatgttcaactttgatttgttcaaaaggaggaacgccgaacggtgtcgtgtactcggtaaagaatggattcacggcggaagtatcaactccatcactcttctttgatgagttgcatgcccctaaaacaactgcaagtccagcagccataagtgttttattcatgtttgtaattattatttgttcttggtgtaaaggtataaattaaactaagagcctgtttaaatttcctcgaaataaattttgcatagccttcatcggccagctttatcctattactaggattaatttgaaaaacaactgtcatactatcactaatttccttttatcaattgaatatcaatagacacaagcaatgatagtaggtatgatggatgccgattccatctatcatactatcactaaccacctgtccgatatttttcttcatatgacttattttcaataacataataagataagaccattgacacccgggtctcgatatcattcacactcgggtgtcaagaccgttcacatccgggtgtaaaaagcctgtaaacgggaatcttcggcactttttctgcctgtttgaagcaaaataagtcacgtatttcaacaaaaaagacggcatctcctacagaaaaacatcctcaatagcttttacttaaaacttgcgacaagttgcaaatatagctatagatgataagaataagctacatattttattaatattgcagtctatatgtactaaataaaagataaatatgaatagaatttgccaacttttcggtattcaatacccagttattcaaggcggaatggtttggtgcagcggatggcggctggcctcggcagtcagcaacgcaggtggtctcggcctgataggagccggctccatgcaccctgaggttttacgcgaacatatccgtaaatgccagtcaaccaccgacaaacctttcggagtgaacgtacccttgatgtatccggaaatcgacgctttgatgaatatattggtggaagaaggtgtgaagattgttttcacttcagccggcaatcctaaaacttggacaggctttctaaaaggacacgggataaaagtcgcccatgtcgtcagcagctccaaatttgctgtcaaatgtgaacaagccggtgtcgatgctatcgttgctgaaggttttgaagctggcgggcataacgggcgagaagagacaacgactctttgcctgatacctgctgtacgccgtgccacgactctccccttaattgctgccggcggtatcggaacaggtaacgccatgctggcaactttcgctctcggagccgaaggggttcagatcggtacccgttttgccctgacagaagaaagttccgcacatgaaaactttaaacaattgtgtctcaacctgaacgaaggtgacacgaagctcttgttgaaaaaactttcccccacccgtttggtgaaaggagaattcactacagctgtcgaagaagccgaagcccgtggggcttccgccgaggaaatgaaagaactgttaggaaaaggccgttccaagaaaggtattttcgaaggaaatcttcaagaaggcgaactggaaatcggacaagtcgcatccttattccgtgaaatgcagaccgtgtccgaagtcatgaaagaaatcatggaagacttccgcaaaggaatggaaaagatacaactggcgttataggtcaggacacaaaagttttttcaacgtcacttctgctctatcatctgcagaagtgactgttccatttgtcattgatttctcgctcatgttcggttacaatcggttcattcggtaaccactattcaagtaccagcacctcgttgtccttatagctttcatagctggaaactattaccttttcacccgcttcaaggccatcgatgacttcgtaatattgcgggttctggcgaccaatcttgatcttgcggcgatatgctttcttgccgtctttgtcaagaacgaatatccagctacctcctgtgctctgaaaaaaggttccacgcgggatgatgatactttctgtcggctgtccaagttccagattaatgtaataggtctgtccgctacggatattatctgggcgttcaccggtaaagacgaaatccgtacggaacttaccgtctcgcacttccggatagactttgcgtacgttcaattcaaaatccgacccctgacgttcgaatgttgcggacaatccctttttcacgcggtcgatataatgttcatcgatcaaagcttcgatcttatagtccgacaaatcgtttatttgtccgatcttctgtccggccgaaacattttggcccaacacgacatccaacaatcccaactcaccgtcgatctgcgagcggacattcaaatgttccttgcgttcatgaaccaaagcaatatttttacgcatattagacaaactagtttccatttcgtccatctggatcgtacgggagatcgaatcctgacgcaaacgttccacaaccaagtcatatttcttacttgccaactcaaaatcttcttttgctttcaggaattcttcctttgcaatcaagttttcttcatacaactttttctgctggttataagcacgacggtagcgtgtcatgtcgacatccagctgtgctttttccaattgattgttcaatttgtcctgttccatcgtcacctgtgtattacgaagaaagttctgcttttccgccaactgtgcctcagcatccaagatctgcaggtcgagatttgaattggaaagacggataatcacatcccctttcttcacctgtgccccttcttccactactttttcctgcacgataccaccttcttccgggctgagctgcacaaccgtaatgggctgtacctgaccgttcacacgaacgaaatcgttaaattgctctttcgtcacattccctatattgacaccgcgggcatccactttcaatgtcgaagcgtgatcaccgaaaacaatccatcccaccaaaatcaagaaaaaagcaccacctactacataaggaatatgcttcttttgaaaacctttctttttttctaattgtatatccatagactgtatgtttttttattttttaattcttaatttttaattcccaatcaacggttgtcctttatagtaatcaacctgacggcacttcattatgtacagcaaacgcctctgtaaaagatcagcctttgagttcaacaaaatcgtcgcatttgtctgcacatcgagtggactcatcagtccttcctcaaatttacgcagggttatctgataagccaaagcatcggcctttactttcttctccatttggatcgtttctttagcatagccctcccgatcgagaacggcttgctctacatctttctgcaactgacgaagtgtttcggtttgcttttcataagcaatccggacattgttgcgggcacggcgcatattggtaatccgagacaagccgtcaaaaaaaggaaaactaaaactaaaataaatatattccccacggttatttttaaactggtttttaaaagcaacgggagcgttctccgatttcagattttcaaaataactggtactgattccagcttcgacggaaagagtcggaagtaattttccttttgttatcaagtaattcattttactagctttcaattgaaaagcggcctgcaaagcagtcggattatttgccatagcataatcttgaatggcactgacagattcctcggccaatatatcctgtacgggaggaacaaccgtatcgacatcaagtgtcaaatccgacggatagttcatcgcgttcttcaaggtcatcatcgccgtattataaaggttctgctgatgcgtcagattgtaatcgtcaccagctacctgcgattcgatctgggcaacgtctgccttccctttcaaacccaattcttcctggcgacgcgttttgtataaaagacgctggctgtcttccaacttttcagaacacattttcaccagtccctgataatagacaaccgtaataaacgcatccataatgctgattgccaaatcatctttctgcttctgcaaatcatttctccccatatagcgattcacatttgccaaccgccattggttaatcaactgcccacctctgaaaagcggcaaagaagcgtataccccataaccgttattaaaggtggaagtgtttacataggtattcgtttccgggtctacagagcgtccgaatcggtactgagcgtctacttgtgtacttatcgaaggcaaaaaagaggctatggcggactgatgttcagccttgtatgtattattggtataaagctgctgctttaccttcggactgttctccacagcatagcgcatgcaatcgtccaaactccatattttattctgcgccattatcgaggctgccagagcaaaagaaagtactgttgtaaatataattcttttcattgctatattattttctacctgataaaatgcaaagagcgtgccaaaacagtcaaaacattatatcacaacatattaacaaatctagtacttttaccaagtgtcaaaaaattagacaatactgtaaaagaattagacaatgaccgtcatccgagcagggttctattctgctcggataagttcgataatggcataaagatagttgggcatataccctaattaataattagtggcagacaaaaacaagactaccagtaaaacaacaaaatttcttttaaattatcagttactcagcagaacaaattatctttgcagcagacatacaagaaaaacagatgacaaaacaaggcactatactggtagttgacgacaacaaaggaatccttaccgcagtacagatgctgttaggcacttgcttcgagaaggtgatcacgatctctactcccaataaaataaaagccacactgcatgatgaaaatattgatgtggttttactggatatgaatttcagtgccggtatcaataccggcaacgaagggttgttctggctttcggaaataaaaaaggaagatgcttcgatacaggtcgttcttttcacggcctatgcggacatcgaccttgccgtacggggaatcaaggaaggagcggccgatttcgtggtcaagccctgggataacgccaaactgctggaaacattgaaaacggcctataatatccggacggcaaaccgtaaaggcatttcgatcgccacagacaaactcgtcgtttccaaagaaagcggaatgttttggggggaaagtaacgccatgcagcaacttcgttccctaattgaaaaagtagcccggacggatgccaacatattggtgactggggaaaacgggacaggtaaggagatgcttgcccgcgagatccatctactttccaaccggaaaaaggagacattggtcccagtcgatatgggggccatcacggaaactcttttcgaaagcgaattgtttggacatgtcaaaggtgcatttaccgatgctcgggcagaccgtccggggaaattcgaggttgccaacaaaggtacactgtttcttgacgagataggaaacctctcctaccatttgcaagccaaattattgactgctttgcaacgccgtagcatcgtccgtgtaggaagcaatacgcctatcccggtcaatattcgcctgatttgtgccaccaaccgtgacttacaggaaatggtacagaaaggagattttcgcgaggatctgctctatcgtatcaatacgattcatgtggagataccgccactcagagaacgaccggaagacatcgtaccccttaccgaaatattcctttccaaatataccaagatatatggaaaaacagccatgtgtctcagcctggatgccaaagagaagctgaaagcgcaaccttggttcgggaatatccgggaactcgaacacacaatcgaaaaagccgtcatcattgccgaaaggagtgtgttggacggcaacgatttcgattttccacgggcgaaaaaaaagccggtgacaaaagaggcgacaaccttggaagagatggaatataacatgattaaaaacgcgatggacaagtatagtggaaatttgtcacttgttgcaagccagttaggtatttcccgccagactttatacaacaagattaaacgatacgaactataatgttgttgaaaggactttaccataatttctatctccgtattgctgttttcatacttctgacaatagccggtacttatttagttctccagcaggaatgggtgtggtttgtcccgatcttatccgtgtggtccttcttcctcaggttagtcctgctgtccgacaagcgaaacgcccaaaaggtagctttcatgttcgatgcgatagacaacagtgactatgctttccgatatgcgacacgtggacgctcgtcgaacgacaaactggttagcgaatcgcttaaccgcatcacgcagattctttttcaggccaaagcggatgccgcccagaaagaaaaatattacgaactgattatgaactgcgtcaatactggtattatagtgctcgatgacaacggtgtgatttatcagacgaacaacgaggctttgcgcttgctcggactagccgtctttacgaatgtacgccagcttgctcgtatagacgagaacctgaaaaccgtcatacaaaacatccaacctggcgacaagcaccagatatcttttaccaatgaacgtggcaacgttcacctgtctatccgtgtttcggaaatgacactacaggacaaacatgtacgcattttagcaattaacgacattaacagtgagctggacgataaggaaatcgattcatggattcgcctgacacgcgtcttaacgcatgaaatcatgaattcagtcactcctatcacatctctaagcgacacacttctctctttgcaccaaaacgcggatgacgagatacgcaacgggttggaagtaatcagcacaacagggaaaagcctaatttcttttgtggagtcataccgtaaattcacgcatattccaacgccggagcccactctattttatgtccagaaatttgcggaacgcatggtaaaactggctcgacatcatactaattttcccaacattacgatcaacgtcagtgtagagccttccgacctgatcgtctatgcagacgagaatttgatctcgcaagttgtcttgaatctgctgaaaaacgccatgcaggcaatcggttgcgagcaagcggatggtctaatcgaagtaaaagcctattgtaacgaagaagaagccgtcctgattgaagtcagcaataacgggcctgttattccgcaagaagaggccgaacacattttcgttccattctttaccaccaaagagggcggcagtggcatcggactatccatctcccgtcagatcatgcgcctttcgggaggcagcatcgccctgaagagcgcaccggccgccaaacggacaacattcgtactgacattcccctaaaagggaaaataatcagccgataaaaattatcaattatcataaacatttccaccattaaatattttatatctttggatggtaaatgagaatttatcggtgtataatatcgtaggcttgccttatttgttagttcactgatgaatcatcatgtacaacaataacataaactattaatatgaacatattagacaaactcaaaatcaaccaccgtccgagtgccggcgctctggacctgttaaagtatatcgggccaggattacttgttaccgtaggttttatcgatccggggaactgggctaccaatctggctgccggctccgaattcggttatgccttgctctgggttgtcacattttcttccatcatgctgatcatcatccagcataatgtcgcccacttggggatcgtgactggactttgcctttcggaggcaaccaacaaatatatgccgcgcgtgctgagccgtcccatcctgatctccgccatgctggccagcatttcgacctcgcttgccgaggtgttgggaggagccattgctctgcggatgctattcggaatgccaatcaaagtaggcgcagtcatcgtgacggttgtctgcctcggaatgttacttaccaatacgtacagcaaaatagaacgctggattatcatgttcgtctcaatcatcggactttcgtttctctatgagctggcattagtagacgtacaatgggaagcagccatcgaaggatggataaaaccgactttcccggagaactccatgctaatcatcatgagtgtactgggagccgttgtcatgccccacaatttgtttcttcactcggaagtcatacagagccgcgaatggaaccttgaggacgaatcggtgatcaaaaaacaattgaaatatgagttctacgatacactgttatcgatggttatcggctgggcgatcaactctgccatgattatactggcagcagcaaccttcttcaaacagaatattgcggtagacgaactggaccaggcacaacagctattagtaccattggtcggaaataatgcaggtatcatattcgccggagcactcctgctggcaggtatttcctccacaatcacctctggaatagccggagcatccatctttgcagggttatatggtgaagcttataaccacaaagacctccattccaaattaggagtcttgttgtcgttcatcccagccctgcttatcatatttgtcgtgggtgatccgttcaaaggcttgatctattcgcagatgctgctaagtatacagttaccaatcacagtttttacacaagtttacctgacatccagtaaaaaagtgatgggcaaatttgtgaattcacgatccacaacgatcattttagtcactttaggagcacttgtaaccttcttaaacattgcgcttctgataagcctgatttaatacaataaccctaacctaaagacagcgagggtgtgtcaaacagacattaccagacacggatgacgcaggtcggaaaaaactcccccaaaacggcatttaagtacacaaagaaaagtaaagtaaagtaaagtaaatctctctcacttcgttcgaaaagagaaatgcgtgcgagagctcttcccttctgaaaaaacaggacaaaagaaaagttgcaaaacagttgcattccggcctttatttcactatctttgcaaactttgaatagacaaattaactacaaagatgagcgatatcaaaacaaacgaagaagaaggtaaaaagagcttgaacttcattgaagcaatggtggaaaaagatttggcggaaggcaaaaacaagggacgtgtgcaaacacgcttcccgcccgaaccaaacggatacctgcatatcggacatgccaaagccatctgtctggatttcggcattgcacaaaaatatggaggtgtttgcaacctacgcttcgacgataccaatccggtaaaagaagatctggaatatgtggacgccatcaaagaagacatcgaatggttgggttaccactggaataacatatattacgcatccgactacttccagcaactctgggacttcgctatccagttgatcaaggagggaaaagcatacatcgacgagcagacttccgaacagatcgcctcccagaaggggacaccgacacaaccgggaacaaacagtccctaccgtgaccgcccgatcgaagagaacctggagctgttccacaagatgaacagcggcgagttggaagaaggttcgatggtattgcgtgccaagatcgacatggcaaatccgaacatgcacttccgcgacccgatcatctaccgtatcgtcaagactccgcaccaccgtacgggcgacaagtggaaagcatacccgatgtacgatttcgcacacggacagagcgacttcttcgaaggtgtcactcactcgttgtgtacacttgaatttgtcgtgcatcgtccgttgtacgatctgttcatcgactggttgaaagagggcaaggatctgaacgacaaccgtccgcgtcagacggagttcaataaactgaacctaagttacacgctgatgagcaaacgcaacctgctgatccttgtaaaagaaggcttggtacacgactgggacgatccccgtatgccgacaatctgcggtttccgccgtcgcggttattcaccggaagcaattcataagttcatcgacaagatcggctataccacttatgatgcgctgaatgaatttgcgctactggaaagtgccgtccgcgaagacctcaatactcgtgcaacccgtgtatcggccgtgttgaacccggttaaactcattatcaccaattatccggaagggcaagtggaagagatggaggcgatcaacaatccggaagatctgtcggcaggtagccatacgatcgaattcagccgcgagctgtggatcgaacgggaagactttatggaagatgctccgaagaaatttttccgtatgactcccggccaggaagttcgcttgaaaaacgcttatatcgtaaaatgtacaggctgcaagaaagacgagaacggcgagattacggaaatctattgcgaatacgacccgaacaccaagagcggaatgccggacagcaaccggaaagtaaaaggtacgctccattggttgagttgtgcacactgtctgccggcagaagtccgtctatacgaccgcctgtggaaagtggaaaacccgcgcgacgagatggcggctatccgcgaagcaaaaaactgctcgcctttagaagcaatgaaagagatcatcaacccggactcattgaaagtattgacaaattgttatgtcgaaaagttcctggcagactccaaaccgctcgactacctacagttccagcgtatcggctatttcaatgtagataaagattctacagtcgataaattagtcttcaaccgcacagtatccttgaaagatacatggagcaaggtaaaagataaataatatcccaatgggataatgtgccaatggaagaatgcaattgcattggcatattggcacattgattaacaattatatagtatgaagaaaaaagatatttcacgcctgttacaacgttatctgaccggccaccaggaaggtaaggacgcctattttgatgccgatgaaatcgatgaactgttggacagttttgaagaatctgatgattatacttactatgatgaagtcctggctctagggctacggcttcatcccggtaatcccgatttgcagatcaggcaatgcaagtcgtatgtctacaacgaggactatgacagtgcgctcgctctgatcgaatcaatagctgaaaccgacaatcaagatctcgacatgctacgtctcgaatgttacgtcatgcaagattcgtatgacaaagtaatcggacatgtagaaaaactcatcgccaacaaatgcgagtatttagaaacgctattcgaatatatcgcaccaatcttaggggatgtggaaatgactaaggaagcacacgatttcatcaatcgcggacttatgcttttcccggacaacctgatcctgaaagacgagctttgctataatttagaaatagagggcgatataaaaagagcgatcgaggtctgtaacgaactgatcgacaagaacccctactccaacgactactggttcactttgggtcgcctctattccatcagcggagactatgagaaagcgatcgaagcattcgactttgccctcacatgcgacgattcgaacgaagagttgaagattctgaaggcttattgcctgtacatgaacgaaaattacgagaaggcaatcgaggtatataatgatattgcaacgaccgacgatatccacattcgcatcactcccctgcttgccgaatgctacattaagctggagaactacgaaaaggcttatgttttgctgaaagagctactaagacagaaccgtcagctgaaagattcaagcatttatatcaattatatccgatgttgtgtcgaaacaggacgtgacaaagaagcctctgatgccctgatgcaagcgtccaggctattcccgaagaatatccgcatcctttccttactggcccttacatatctggaaaacggagacgaacacaaggctatggaagcaactgaacgccttttcaccgccctcgaccaagtggaagacaagcagcaagaagacttcgagagcttataccgtgccggccaatatttgtttatgaaaggagatatcgacaaagccttacaatactataagaaagtgttggaaggcagtccggaaatgccttatatgcatcttcatatggcaatggcatatctggcaaaaggagatatgaaacatttcggtgagcactacaggcagacatctcccgaagaattgctcgattatctaaaaaatgccgggctcagttatgaagggataatcgagcgtatcggcagcaaacatattccaccggaagacctggtgaaagaattcctcaagaataaggataataataattaaacatgaaaagaaatctaaaagactacggcctcttagttctaaaaggcatgggtatgggtgcggcagacgtcgtgcctggcgtatcaggcgggaccatcgccttcattgtcggaatctatgaagagttgatcgactcgatcaaaagtattaacggagccagtctcaaactgctttttaccggaaaaatcgcggcattctggaaagcaatcaatgccaacttcctgctatccatcattgcagggatcgggatcagtatcttctcgttggcaaaaatcatcacctggctgttgacagaccaccctattctggtctggtccttcttcttcggattggtacttgcttccacctggttcgtttccaaagatatcaagaaatgggattggaaaacgatcctgagttatatcatcgggatcgttattgcattctacataacggttgcgacaccagccgagacaccttccaacctgttctttatcttcctttgcggagcgatagccatctgtgccatgatcctgccgggtatatcgggtagtttcattttagtgctgttaggcaaatatttttatatcatggaggcggtaaagacattcaatattcccgtaatgttagtgtttatctgcggtgcggcaatcggtatcaccagtttctcccgtgtgctttcgttcgctctccgccggttccacgacattacgatctccgtattggccggttttatgctcggttcgctaaacaaggtttggccctggaaggaaacgatcgagacttatacggacagccacggcattgtaaagcctttagtcgaagccaacatcatgccgaatcaacttgtttgggaagctgtcggcctgatggttttaggctacgccatcgtttacttcttagaaaagctctcgatgaaaacatcgaaataataaattacaacaaaaaaagaggttcagcagcatcattttttgcagttgaacctctttttattctcactccaccccaccttatcataaggtcgtgtatacaaacgcctctaccgcatgagtaaggatataggcggcaggcgtaggatgggttgccgaatagccttttttcaactcttcgagcatctctttctttcccgtccccaagaccgggaccagcaacggcgaatcgttcaggatcagcgggccggtcatcgtgatacggaactgatgggattcgggatgttgggaaacggcgtaattacggctgtccgtcaacagcggcaaggtatccggaaaaatggacgcagtatgcgcatcacctccgatacccaagatgatgcaatcaaaatagggcaattgcccgtgccggggcagatactctttcacgacacgcgaataacgcatcgcttccgtaccaggttccacttctccatgaatgcggtgcacatgaccgacgggtatatgcagcggcttgaacaaaagctcgtttgcatgtccataattactgtccgggtcagttggcggaacacatcgttcatcgacccaaaagaaacggatcgcatcccagtcgatcttatccttatattcatccacccaaagagcgaacatcttctgtgccgtccctcctcccgacaaagcgaggttgaaaggcagtccgtcatctttccggtccatataccggacaagctctccggtcattgcccggagggcctctttatcatctttaaaattctctatgatcataatcatccttttttatcattgacaactttggcaagggcaatccttcggtgtcatccccaacttggccttttcgatcgggccgtcttcaccgggggcgtagaagaacaggttcttcgcaccctcctccttccaatgatgaaggatcgggtcgatcagccgccagcttgcctccaaagcgtcgctacgggcatacaaagtcgaatcgcccaacatggcatcgagcaacaggcgttcataggcatcgggcagatagttcttcgaaagcgaatcatagcgaaaatccatacccacctgcttcaccgtgaaaccggctcccggcattttcagaccaaacttcagcgtgatgctctcgtccggttggatacggataatcagtttattacaggagcctcccgaacattgtccggcgaaaagctggtgaggagtggacttgaagttcactacgatctccgaactcttttccggtaatttcttcccagtaaagatatagaacgggacatcgctccagcgccagttatcgataaacattttcatagcgacgtaagtctccgtggtggagtcaggcgccacattcttctcttcccgatagccatcgtactggccacgcacaatcagatcatccataccatgcgtcttatacggacgcaaagcacggaacaccttcacgatctcgtcacggatcggctccgggtcgaacaccgaaggcgactccatcgccgtaaatgccatcagttgcatcaagtggttctggatcatgtcgcgcaccccccccgccccgtcataatatttcccgcgattctccacgccaagtgtttccgaggcactgatctcgatcgagtcgatataattacgattccacaatggttcgaatatgccgttggagaaacggagaaccaggatattctgcactgtctcttttcctaaataatggtcgatacggtaaatttccttctcatcgaagatatggatgagatgcttgttcagccgttcggccgattcgaggctcgttccgaaaggcttctccacaatcacgcggcgccagccatcctcgcttccggcaacattcatcccgttttctttcaggcaggtcgggatcaactcgtacatcaccggcggcgtggcaagataatagatgatcttgtccggcaactgctgctcttgccgtaactgatggatacgatctttcagtttatggtatccggcggaattggtcgaatcgaacgcaaggtaaaagacacggcggaggaaactgtccagttcggcatcgtccacctctttgttttttagggattcccggatatgcgccttttcgaaagtgcggtattcatcgtcggaatattccgtacgggccgcccccaagatacaaaagcgctccggcaagagtccccgaacgtgcagttcatagagcgaaggcaagagcttccgccccgtcaggtcgccggaagctccgaatatgactaataattgattgcttgctgttttcatttgcttttttaatttaatgatgtcaaaactttccgaaagcctcaaaaatcattttttaaagcagcggaactcccgaaagcccaaaaaatcatttttgagggtggcagaactttctgaaagcctcaaaaaacatttttgaggatggcggaactctacgaaagcttcaaaaactatttttgaggttttcggaaagttccaaaacagtagaatcagacgctatacgtgcccgaaaccgtattgcctccttccccagtccaattggtgtggaagaaatgaccacgttcgcgatcggtacgttcataagtatgagcgccgaaatagtcgcgttgagcctgaatcatattcgctgccgaatacagcgtgcgcaacccatcaaaatagtttagagctgaactcatggcaggcagggcgacaccgctcagcgcaccttcggcgacaacccggcgccaggcaggaagagcctcctgtatcttagtgtggaaaaagtcatcgaagagcaggttttccaagtccgggtccttccggtatgcctccgtgatcttttgcaggaagacggaacggatgatacaccccttacgccagatgcgggcaatcgtcccgtaatccaaatcccaaccataatgctcggaagcgtggcgaagcaaggagaatccctgtgcataggaaatcagcttggctgcgtatagtgcctgacggacgtcttcaattgaaagttgaaagttgaaagttgaaagttgagcgttgtctgataactttccactttcaactttcaactttccactataaagtcttgccgcctttattcgttcgggatacaaggccgagagcaagcgggcgtaaaccgcttcggtgatcaacgtcagcggatcattctcgtccatcgctgcaatcgcgctccatttgccggttcccttctgtccggcgatatccaatatcttgtcgagcaacggttttccgtcttcgtcacgaaaacgcagaatattggcggttatctcgatcaggaaactatccaattcccctccgttccattcgtcaaagacgacggccatcgcatcgttgtccaatcctttccggtttttcaacagcgaataggcttcagaaataagctgcatatcaccatattcgatgccgttgtgcaccatcttcacaaaatggccggctccccccgctccgatccactcgcagcaaggcgaaccatcgtccaacttggcggaaattccctgcaagatgtctttcaccagcggccaagcttccaccgaacctccgggcatcacggacgggccgtgcaaggctccttcctcgcctcccgaaattccggttccgacgaaatagatccctttcttttccaactccttcacacgacgttccgtgtcgtggaagtcagaattgcctccgtcgacaattacatcgcccgacgaaaggaaagggagcaattgcgagatcagctcgtctacaggacgccccgctttgaccatcatcatgatgatatgaggacttttcaccgagtcgaccaattgttcgatcgaatgcgttccgataaaacgtttgcttttgccccggccattgataaaacggtctacgactccctcttcgccgggtacgctccggttatatacggcaaccgtgaaacctttgctctccatattgagcgccaggttctcgcccatcacggcaagcccgatcaatcctatatttgctttcatatttcagttgtttttatgttgaattctatttaaggaacattctttttaacctaattgttcccaatgagcatctatttattgctttgttttctctctggaaatccgtcatttctcataaactttagatacatttgaactcacaaaccatctgaagcattataagacggataaaatgaataaagcaataatagccatcgactcttttaaaggctgcctgacctcggaagaagccggaagtgcagtaatggaaggtatcaaaacgatctttcccgattgcgagaccttgctgtttccgatcgccgacggaggcgaaggaatgttagacatactcacctccgcaacaaaagggaaataccggaccctgccggcacacggtcctttgatggagctcgtgcagggacggtacggtatttcgggcgacgggcaaacagctctgatcgagatggcagccgtcaacggcttgcctttggttcccgaagacaaaaggaatccgatgctgacgactacttacgggacgggagaactgattcttgacgccctcgaacaaggttgccgccactttatcgtgggcataggcggcagtgccaccaacgatgcagggttaggtatgctgcaagccttagggtttcgtttcctggacaagcagggaaatctgttggggacaggaggcaggatcatgtcgcaggtagcctccatcaatacatctgccgtacatccggctttaaaggaggcccgcttcacgattgcctgcgatgtacgcaatcccttctgcgggtctgacggggcggcttacgtattcgcttcgcaaaagggagccgatgccaagatggtcaaagaactggataccggtatgcaggcactttcacgggttatcctgtcgactactggcaaagacatttcggatatccccggagctggggcagccggaggaatgggcggaggtttccttgcgttcctgaatgccgagttgaaaccgggtatccgcctgatgctcgacgtgctggacttcggtaagagaataacgggagccgacctgatctttaccggtgaaggacgggctgatcggcaaacagtgatggggaaagtgccttccggtatcttggaagaggcccggaaacaaaatattcccgtcatagtacttgcaggaagcatagaagatgcagctcaaatgaaccgggccggcttccagggaatattctcgatcacacccggtccagtcacaatggagaaagcgatggaaccggaatttgcgagagaaaatatccgcaggctggtgactcagatttgttcggtaatccacccgttcgccacgcgctaaaacaagaaaaatatgtacacggaatatcaaccttgcggactattgtcggcctacattgataaatattgggtattcaaaggaaaagccgaactcggcacgtacttcaaaatattgccggacggttgctgcgactttatcttttccattggagacactgcacaatgtgtcggcacgaaccagccggtcatgcaaccctatcgttgcttcttcgtcggtccgatgactactttctcggaattggtcacgaacacgccgagcgttcacatgctgggagtccgtttccatccttgcgggttaaccgctttctgcaaaccgcctctctctgaatttacgaaccagaggataagcagcaacgacttgacgcttctctttacggactcgtttgccgaatcattatgtgaagcacagactttacagcagcagatttgcctgatcgaacggttccttatccaccgcctgaaagacaactatgagattgatcctcagattccgttcgccgtgcagcagatcaatcgctcgaaagggcgtctcccgatcctgcaattgatggatgaaatctgcatttgccaacgtcatttcgaacgcaaattcaaagcatataccggctatactccaaaagaatacagccggatcatgaaattcagaaacaccatcgacctgctgaaaaattgcgtaccggacaacctgcttacgattgccgttgaagcgggctattacgacctctcccacttcaataaggaaatccggcagttatccggcaatacaccggcttctttcctctcgatccctatccccaaagatgtcttgctgacttacctggaatgaaaaagtcgtttttttacaatagagcagggcagttccacccctacatttgcacgtaactaataaaacattgaaatatgaaacttatgaaagaaaaagcagaacagttattgcaacgttgcgaggttgtggttattacttccgtcaacgaagaagggtatccccgccctgtccccatgagcaaaatcaaatcggaaggatattccgtggtctggatggcaaccggcaacgactctctgaaaacgaaagatttccgtctgaatcccaaagcaggcttatgctatagcgaaaatggcaatagcgtggcattaaccggagaggtagaggtaattaccgatgctgaaataaaaaaggagctctggcaggaatggtttatcgcacacttcccgttaggaccggctgatccgaattatgtcctgctcaaattcaaaggacaaaaggctacgatctggatcgatggggtatttattcacgaatagccagattcagattagaaattcttcttctcgtcgataatatattccggacgtgctttgatctcgtcaaacaagatgccgatatattgccctaacacaccgactgtcagcaattggacgccgccaaagaaaataacggaggtcatgatggaagtccaacctgtttcagcattgctgaagccgtatatcttgcctaaggtaaaccagacggccagcacgatgccgaccaatacggcgataaagcccaagcttgtcgccaggcgcaacggtttcttggagaaataaagcatagcggtggtggcaaacttccacattttgctgaacgggtatttcgtttctccggcaatacgtgcctctcgttcataatagaaaggaatctgcttgaagcctacccagctgatcagtccgcgaatatattttccacgctcctgaaaacggtcgaactgatccatcaccttgcggtctatcaagcggaaatcgcctgtatctaacgggaaattcacatcactcatgtagttcagcatacggtaaaaagccttcgccgtcactttcttgaaaagcccttccccttcgcgggacttgcggacgcaataaaccacgttcgcctgctccttttcctgcaattcgagaatggatgggataagttcgggagggtcctgcatatcggcatccaaaatgacagccaagtcggcatcgcaattgttgatacctgccgtgacagccggctgatgtccgaagttacgggagaaatggatcaccttcacctgcggatcggaagccgcgatctcgtccagcatcagacgcgtccggtctctactgccgtcgttgatatagataatttccgttaaaacagggagcttatgcaacgcctcccgtgtacgccggtatgattcggcaatgaccaactcctcgttataacaagggactatgaccgcaagtttcttcatctgcatttaagctttaaacgtataaaacttattcatgataaaattaatcaccgtgtaaaaagccattgctatcaattggttataatatgggtcgatcgataggtatgaattcaggacatacactaaaagccccaattgcaacagataacacactccgaacacgacaccgaaacggacggcactgccgatccatccagccgaacttcggaatgtccattgcttattccatataaaactattcaatacgcctgctacataaccgaccatattcgaaacaacatccgaacatccgaacaacttcatcatgatccagatgacaacggcggttatcaccgtattactcactcccactataccatatttaatggcttgcttgactgtttcctccattcttttttataatctcttccacttcctcggccgacaactccttcacattcgtgatcgtgaagacctgcgaaagaaagtttccatactggttacattcgttgatcaccttgtccagcgcctgcttgatatctgcccggacagggatcaggaaaaccagctccatatatttttcacctattgtcaaccgctcgatttcgcaacccgccttttccaaggaataggggaattcacgttcaatcactttcttctgatactccaagaacggtttcagctcattcgccaggatcagcacataaaaacgcaacttctccccttttcctcccaaaccggtagagatataaatctgcttctcgtccgacagttcggattccagagcgatacggctttccatcaaagccatatatgcccagtctgccacatccggatccggagcctgggcatattcttccaatatcctgtatgcttttacctgtcgtgaggtagcgagtatagacaatacatacttcttatgttccacagtcgattcgggatcatccagactatcctcgaaaaccgaaaaatccattttcgagatatccggcttatcctgatctttcctgatcttttccgagtatttaaaatattccatctgccgttctacgggtacacgctgttctaatatatggaaatgtccgtcaatcttactaaaagagtcccggaacttcttgaaaatatcattatcctctttcataaagcctgctttttagttttgtacatatccaataaacaagaaactaagacaaatgtaaggctttttcgcgataaataacttatagctgagataaaacgcaccaaaattattgcaacttccccagaaccgttcttgttttagactccgactcacgcccctgcataaataaggaagcccaggccaatcacaaacaggacgaacattccggcattcagaaaatccgaagaacgtggagctcttctgaattcatgccatatcagaatcccccaaagtgcggatacaagtgtcgccccctgccccaaaccgtacgaaatggcagctccagccttttcagaagcgatcatactaaaagactgcccgatacaccagataacgcctcctaatatacccaccaagtgtgtcttggtattccccttgaaataaccggagatagaaactggttcaccttccaccggacgtttcatagcgatcgtattaaacaggaaattactaacaaacacgcctaaagagaagataaacacagcggtataaggtgtcagcttgcccaatgcgggctctgcaaaattatccagatccatcgaagccgcaacaaaacggtagaagaaagccatgatcacacctgctgcgacagaaataaaaagaccttttcccgacacttttttcgaaccgaccaatgctttcttataggccagaccgttcagcaggatagcaactgcgatcagagctacgccaataaagatatacaaaggttctcctttagccgctccgaaataattgactaatacgcctaataccaacgccagcccgattccgaccggaaaagctaccgacaggccgcaaattgcaatagctgccgataataggatattggctgcattaaaaataatgccccccaggaaagcgctccctaacgatctcatatcagcttgtgccaaattaagcagaaacccctgcccctcagagccaaagctgcccaacgtaaaagcggaaaaaacggaaaagagcaacactccaatcacataatcccaataaaagaactcataccgccaagtcttcgaggccagcttctgtgtatttccccacgatccccaacaaagcattgtgacaacacaaaacaggatcgccaacgaataatcttgtactataaacataacttccttactttgaaacaggttgatgcatcatataattttcaataagaaccgccatctccaccgccggcactttctcgatcagacgaaggtccttacctttcccatctggtgtccagctattggctccttcatcattcacgacacggaacgttccgcgctccacattataataaggttcataccctttgactgccaccagcacagccgtaagatcccaactcatccggccatttggatcgccttcggcaaaacagagcgaataggcatctttcacaggactgtcttccacatccatctggaccagcttcttcccggtaaaaatcatatttccgatctcaaaaccactaaatatgatttccgtaggccatcgctctgccaccacacgggatgctggggtatcacaatagacattaaattccttcccttcgggaaacaaacctgccatcgaaaccacccgtttcaccttcttcgcgactaaatcacagccggaaagcggactatattcgtcaccaccggaaagcaataggtccttcaggttggtgaaaaaaccgatcgtacaaaccacaacgctgctatccggctgcgtactcaaaatccggcgatagaccttcaccgcatccgaagcatccgaggtttttgccgttttatgtggataacgtgccggaaactcttccgtccatttagtcttatgccaggtggtcagcgaaacgccaccctcgcttttcggagcaccgacaggaatgtccggtcggttgaaataggtgttcagcacttctatgcagggtacgacatgctcgtccttattagacgaaacaaccgctaaaatgttcacttgcccactatcagccaacgcgtgcatcagagccatcgcaccgacatcatcataatccggtcccagatccgtatccaatatcaggttgacaggctgcaccgtcgtttcttccggagcagttacagccgattttccggaacaggccgccagcaaagcggtcaaacaggtaaaaagaatcgtttttttcatgttattgaatttatacaagatttgattaatcgaatatatccacttcgttccgataaggagctgacgactgcgcccctacacgtgtcaccgagatagccgaagccttacaagcaaaccggacggattctttcaaatttcgcccttcggacaaagcgacagtcagggctccattaaatacatcgccggcggcagtcgtgtcgacagcttctactttcaaagcgggaactatctcggcttctccgtcgctacaaataagtgccccttttgatcccagcgtaataataacatgctgcactcccattcccgaaaggacacgggcagcctccaccgctgaaatatcgtccgttatcttcacaccggtaatcatctccgcttccgtctcgttcggcgtgatcaaatataaatgatggagcagatcggccggtaatggatgtgccggagccggattcagaatcactttcttccccttttgccaggcgatatccgcaacaaagcacacggtctccatcgggacctccagctgcatcaggatcaagtcagccaactcaatagcctcctctgccttcgctagatcggacggcagaaggttagcattcgctcccgaagcgacgacaatgcagttttccgctttttcatctaccgtgatcagggctacgccggaaggattcccggaatcagaaaagacataagaggtattgattccctcctcctcgaaaagttgttgtgactggtgaccgaatatatcacttccggtcttgcatataaaagtgacggaaccacccaaacgcgctatcgccacagcttggttcgccccttttccaccgggattcataaagaatgttccacccaaaatcgtttcacccggacgaggcagatgagcggcttttataaccatatcggtattgcaactcccaaccaccaggatttgtcgtctggatatttgtgttgtgtccatattttatttcgtattaaattatgaatcatttgcaatgaagcgttacaaatataatatgtatatcgtttcttttttccacataattctttggaaaagataaacccaaatcttatttttgtaaataacatatacaaaatatatcttatagacaaacagataaatttatgaaacaggccacaaaactcaatcaggtcatgctattgatcaagtcgctttccaaagcggaaaaacgatacatcagactctataccaacctgcaaaacggggataaacattatatggttctatacgacctggcatgcgaaggcttctccgccgaacaaatatatgagaagttttgcggcaaagtgaacgaaaaaagctttgagatagcagccaagcatctttatcgggtattgttggattgcctcgtccaattgagggagaaacaagacatacagacgactatcttcaattatatcacaaaggctggcattcttttcgaacgggaacttttcgacaatgcacttgccgaattggaaaaagcaaagaagctggccgtcacatacgaaaacgatccactcctccttctgatttaccgtacggaattgaaatatctaagcacactcggtttcgaaggcatcagcgagaaagaactggtaagcaaacaaatgcagattaacgacgtaatgaaatatgcccgcaacacgaacctccacctgcaactatatgatattctgaaataccgcattacctataaagggtatgcccgttcgaacaaacagaaagagaacctgaacgatcttgttttaagcgaactgaacttgatcgccaaccattcctaccagggattcgaggcacacaaacttcacctgttgttccaagcgacctactacctgaatgccggaaactataaatcggcgatccgcttctatcaggaactgatcgcgcttttcgaagcgaaccggcatctaatcctcaacccaccgatctattacctgagcgccatagagggagtactgaacagcctgcacgttgccggattataccgggaaatgcctttctttttgtccaaactgaaagaaatcagcacgggcaactacccaacagagttcctgatggaagtacaaggacgccactacctgtacgaactctcgggattgctcaacaccggacaatttgacgcggcagtgcatcttacagagacctataccgatttttttgctaagaaagcaaccatgaccagaccggaaactcaactaaaactatccctctattcttccatcctttatctttgcctgggagaaccgatgaaagcccgtaaaagcatgaaaaacatactcggttccggcaaattcttccacacattgccgtcctacaaaacagcccgcctcatcaatctccttatccaggcagaactagggaactattgctttttcgcgaacgaaataagctccatcaagcgaatgatcggttacgagaagcaagtgtatatcaccgaaaaactactattccgcttcctaatggcccatccattacccatctataaaaaagaccaagagaagctgtggtcacaataccaaaaggatataatgcgtatccggcaagacaaatacgaaaaacaacttcttaaaactttcgattttacagcttggatcgagagcaaactaacaaacatccctctccgggagattttgtcgcgaacagattggtatatatcggcaaaacagtaattcagggcataatatccgtaatttatctacaaagagaaaaagaatacatgccgacctttgtaaaaaaatcaatgcaatagattcaaaaatgtgccggctaataccattgttggttgcgcatcggccaaatcaatacaaaagatatgaaaaaaataatagcattagcattgttgatggctggagtcacggcaatggaggcaggaaacaggataattgaagagaatataattcaaactgataaaaagaatatagaaatggaagacttagaattgacaaaagaatgggacaagattttcccgaagagctataaagtgaatcacagtaaggtaacatttcgcaaccgctacggcatcacgcttgcagccgatatgtatacaccaaagaatataaacgggaaaatggcggctatcgctatatccggtcctttcggggccgtgaaggaacaagcatcaggcctctacgcacaaacaatggcagaacgcggtttcctaaccatcgctttcgatccttcatacactggagagagtggtggaacaccccgctatgtagcctctcccgacatcaacaccgaggacttttgcgcagctgtggatttcctctctacacacgatgacgtcgatcccgaacgcatcggcatcatcggtatttgcggatggggaggtatggcactcaacgctgccacgatcgatacccgcatcaaggccacagtcacttccacgatgtacgacatgagccgggtaaacgcaaacggctatttcgactccatgaatgccgaccagcgccatgaactccgccgccaactcaacgaacaacgtacaatagacacgaagaacggctcatacgcgctcaccggcggagtggtcgatccactccccgacgatgtcccctggtttgtaaaagactatcacaactattataagaccgatcgtggttatcacaaacggtcactcaactccaacggaggatggaacaagacatcggctctttcgttcatcaacatgcctttactcacttacagcgacgaaatccgtagtgccgtactcatgatacacggcgagaaagcccattcccgttatttcagcgaagacgcattcaagaaactaacgggtgataacaaagagttgctgatcctccccggtgccaaccatgtcgacctttacgacaacctgtcagtaatcccgttcgacaaaatcgaacactttttccataaatatttgaaataacaaaaagtctggaacgattcaggaatttcatctaaaataggccaagtaaaaggttatgtacaataaggccaaggactactacaaggcatggttcgtccttggcctttgttgggaaaggaagtaaggtcaagtcctggcaagtctccggcgttcgaaacaagctccaaaatactggtccggcctgtcaccgaaagctcctataccggttgcacgaaaacgatcaatggcaggacctactattattcataatttgatacgatagacggagaaactaagcggtctcaagttcacttctccctgcggagcctccacctcaatatcagaaacgagcgggactactgtcgaaggattacacaatgtgtttttagcttccaggtcggaagaatggagcaacgtaagcgtccctttatgcttaccggccgaaagaccgttcaagttcaacttaatccgcttgttacggattccggtattggcgactttgatgataagctcgtctgaatgcttatcgaccgctgcagtggcatacaaatccaactgtccggtaaccggttcgccctgcatggtcagcggaacgacgttcgtaccagcattatgaccatatagctgctgcacataatagttaggagtctttaccaatgaaaggttgtcgaaccagatcagatccggacgccactgccaagcatccacatgagcaaaaagcggggcatacgtgcataagcacaccacatccgcgtttcgctcgaaacctgtcataaaagcggcttcacacaaggcggtcagaaaactgttctcgcggttgacagaatggcaggcatattcgccggcaaacactttcggtccttggcggtcgtacgaatcatagcgtttggctccgttcaggaaccattcaggagagcggtagaaatgttcgtccactaaatccactttcaagcgcctcatttccggccagaggtaatcaaaatcctccccttccgattgcggaccggaactaccgatgatctttatctccggatatttagcccgaatcgctttgacaaacagttcgagacgttcgggataaagcggtccccactgttcgttgccgatggcaataagtttaaggttaaaaggagccggatgtcccatatcggcacgtatctttccccattcgctggttgccgaaccgttagcaaactcaattaggtcgagggcgtcgtctatataaggttgtagcttatccaccggacaattctcgttcgggtcctggttttcatactggcaggaaagaccgcagttcaacacgggaagcggttcagccccaatatcttcactcaataggaaatattcgaaaaagcccaagccgcaggactgataataatccggaaactttttgtgcgagaatgtatagttccatcgattgatattgatcggacggttctcgaccggaccgaccgtgtttttccactggtagcgggtagccttgttcgttccctccacaatgcaaccgccgggaaagcggaagacaccaggtttcagttccttcaaagcctgtgccaaatcagcacgcatgccgttcggacggttgttgaatgtcttttgtggaaacaatgaaatatgttcgagatcgacaattccttttgtcaccatcgtgatacgcagacgggaacgggcttctgtcgctcccggcgtcagaacaaccgtatatttcttccattccttgccgctcacctcgatctctttttgctcgtacaggtcatttcgactgtccactaggtttatacgcagcttgaccggcgcatcgccggaccgagtgcgggcatataaagagaagtcgtacttctccccttccctgatgccgatcccattgaagccttcattgtcaaggccggttccggtcagctccttttcataagaaaggcggacataatgcggattacggtcgaaacagggcttctgggtctgcacactgacattcccgaagggcgtccagcccccaaacggattttcaaactcgaaagaacggttcttgacaagttcggcatacaggccgccatcggctccgtaattgatatcttcaaaaaagatcccgtacatggtcgactggataggcgcacctgttttctgcacatctatcttaaattcattactttgtgccattaaaccgacaacacccatgctaaacagacacagggcaatggcttttttcatactttttgtcataggtatgtgtttttccgtgaatacaaagattatttagttacaaatgtacactaataaatccgattgaaagaagacgtatcgtccgttttagcagacaaaaagccgttttatgctataaaacatcttcaaagtagcgcatgaatacaaagaagagagtaattttacacacaattttgaaactatatttacatgaagaacgaaagcacgctgtctggcttaactgtagctaatttcagcaagcaaatagacggcaaggagacgatgctatgcatccttacaaataacaaaggggcagaacttaccattaccaactacggtgcaaagattgtatcgcttatggtaccggatcggtccggaaagttaaccgatgtagtaacaggacacaattctatagacgaatacctggtttccgaagaaccttatttcggagctatctgcggacgatacggcaaccgtatcgcgggcggaaaattcacattggatggcattgtgtacgataaattggctatcaataatgggccgaacagcctgcatggtggtttgaaaggcttcaattccgtagtctgggacctaaacaagatcgacggccagacggtggaattgaaatacacgtctgccgacggtgaagaaggcttccccggaaaactggatacaacagtgacttatcatctttccgatgacaatgaggtcataatcacgtatcatgcggtaacaaacaaaccgaccgtcttgaacctgaccaatcactcctacttcaacctatccggccaaggtgatccttccgtatatgatcataaactgacaatcaatgcagactactatctgccgaccgacgaaacggctataccttatggtccgaaagaaaaagtagaaggaactccgatggacttccgtactccacacgaagtgggcgaacgtatcgatgaagatttcgaagcactgaatttcggaaaaggatatgaccatacatatatattaaataaaaaagaagagaacgagctgtcactctgcgcccgttgcacatcgcccaaaaccggcatcgtaatggaatgctacacgacacaaccgggtgtgcaattatacacaggtaattggatgacaggcaatttcgtcggcaagaacggacaacgctatccggcacgtgccgccctttgtctggaaacacagcactatcccgacagcccgaacaaaccggagtacccgtccaccgtcctacgcccgggtgaaacgttccagagcaagacaatttataaattttctgtcgaataacaagtaacaaattaataataacaaaaaaaacatcaatcaatgactcaacaaaaaaaacaatggagtgccatcatcatcatgattgcactttttgctatgatcgcattcgtgacaaatctttgttcaccaatggctattattgtaaagaacgacttcggagcaagcaatgtccttgcccaaatcggaaactatggtaacttcatcgcctatttggtaatgggaatccccgcaggtatgctgattgccaaatatggctacaaaaaaacggctcttatcggcctagccataggtatcatcggtattttaatccaatggttgagcggtcacgtaggcaaggaaagcgctttcttggtttatctgatcggagcgtttaccagcggtttcaccatgtgtattttgaactgcgtagtcaacccgatgcttaacttgttgggaggtggcggaaacaagggtaaccagctgattcagctcggaggtgtattcaacagtaccgcagccgttgcttgctacatcttgatgggagctcttatcggtgatgcagccaaggcacatattgccgatgccacccctgccctgatgatcgctttggctatttttgtcatcgcatttgtagtgatcatgttcactaaaatcgaagagcccgaacaggctccggtcgacacaagtttaattaaaggagctttaagccatcgtcattttgcattgggagccttggctatctttttgtatatgagcgtagaagtaggtactcccacctatatcttgcaatatctgacatctaaaggtataccggccagtactgtaggccttatcgtagctgtttactggttgatgatgcttatcggacgtttcgtaggagcaagtatcggtgccaaaatttccagccgcgcgatgatcacgactgtcgcaagcgccactttgctgttagtgagcttcggaatgttttcacctgaaacgagtacggttgaagttcccggtatagattgggcttcattaagcgttatctggcaggaagttcccgtcggtattctggcattcctcctcgttggtctctgcaccagtgtaatgtggggtggtatcttcaatatggcggttgaaggattaggtaaatacacggccattgccagcggtatctttatgacaatggtgttcggttgcgccgtaatggttgctatccagggttgggttgccgatatgaccgactacatgaccagctattgggttgtgcttttcagtgctgcttacattttattctacgcagctatcggttccaaaccgtcaaaaaaatcagaataagactataaatatgccaattcatgaaattatccggttaccaataaagccggataatttctttatttataacacatctaaaaaattaatatcatgcaacaaaagatcagaaataaatttcaggagttattctcaacaaaaggtagcgtatatgcatctccgggccgtattaacctgattggcgaacataccgattataacggtggtttcgtatttccgggggctatcgacaaaggcatgattgccgaaatcaaaccaaacggtacaggtaaagttcgtgctttctctgtcgacctgaacgactacgccgaatttggcctgaacgaagaagacgctccaaaagcaagctgggcaagatatattttcggtgtttgccgcgaaaccatcaaacgtggcggacagatccagggattcgataccgtgtttgcaggcgatgtacctctgggtgcaggcatgtcctcttccgccgcattggaaagtacctatgcatttgctttaaacgacttgttctccctgaacatcgacaaatttgaattagctaagatcggtcaatcaacggagcataactattgcggcgtaaactgcggtattatggaccagttcgcttctgtattcggaaaagaaggcagtttgatccgtctggattgccgttcactcgaatataaatatttcccgttccatccggtcggttacaaattggttttactggattcagtcgttaagcacgaactggcatcttcggcttacaacaaacgtcgccaatcttgcgaaaacgccgccgccgcaatccgtcgcaatcatccggaagtcgaattcctacgcgatgcgacaatggatatgctgaacgaagtcaaaggcgacatcagcgctgaagattatatgcgtgccgaatatgtgatcgaagaagtacagcgcgtactcgatgtttgcgacgctttggaaaaagacgactacgaaaccgtaggcaagaagatgtacgaaacacatcacggcatgagcaaattgtacgaagtcagctgcgaagaattggacttcctgaacgatgttgccaagaaatgcggtgtaaccggctcacgcgtaatgggtggcggtttcggtggttgtacaatcaacttggtgaaagaagaaaaatacgatgcattcatcaaagaagcattcgaatcttacactgctaaattcggccacgaacctaagttatataatgtagtaatcagcgacggcgcacgcaagctcgcataataattaattataattccataaaaaaaatcatgacagccgctttttatcagaacgaaaccaaattttacgttgcagtagattgtattatactcggattcgatcaaaaagagcttaatgtattactttataaacgtaagtttgaacccatgatgggacaatggtctctgatgggcggttttatcaaagcaggagaaagtatagaagaggccgcctcacgcgtgcttaccgactgtaccggcattgataatctttttatggaacaggtaggtgcttacggagatattacccgcgatctcggagagcgggtaatatccgtagcatactattcactcgtcaatatgaacgatttcagtagcgaaacactggaagagtataatgcagtctgggccaaggtcagcgaagttccacaacttattttcgaccataaccaaatgatcaccgacacattagcccgtctgcgcagaaaagccgctacccgtccggtcggattcaacctgcttcccgaaaaattcacgttaccgcaattgcagaacctgtatgaagccatctaccagactcaactggacaagcgtaatttccgcaaaaaactaaatgcgatggatattctggagaagttggatgaaaaagacaagaaaggttccaaaagaggggctttctattatatgttcaacaaagaaaaatacgaccatctgctggaacaagggttctatttctccctataataaaaaacatcattcaacatgctgactttggcagatgtgccggatattccgatcacaaagtagcccaagcggaacagatttgcgcattcgatgtttccatattcgcagccgtagcaccgtgcatatatgccaaaatcgaagacacacagcggactataggataaggttttgcaaaagaataccagtcgaatcataaaaatcatctggcgtatcttgctctctatgagaaatatcggaaattaggaaactttacagaaaatgaattgtttcatcgataggatggtcattacgaagagattgactatctttgcaaaaaataaaaataactcatcacaatgaacgatattaaattaatgaacaaagcagcggacaacatccgtatcctggctgcgtcaatggtagaaaaagcgaaatccggtcaccccggtggtgcaatgggtggtgcagactttgtgaacgtactgttttcagagttcctcgtgtatgatcccaagaatcccgcatgggaaggcagagaccgctatttccaggaccctgggcatatgtcgccgatgctttattcagtactcgccctcgcaggcaaattcacgatcgacgaactgaaagagttccgccagtggggtagtgtgactccgggacatcccgaagtcaacgtgatgcgtggtatagaaaacacatccggtccgttgggacaaggccacacttacgccgtaggtgctgctatcgccgccaagttcctgaaagcacgcctgggtgacgtcatgaatcagacgatctacacatatatatccgatggtggcatccaggaagagatttctcagggagccggacgtattgccggtacgctgggactggacaacctgattatgttttacgatgccaacaacatccagctttccacaaccgtaggcgaagtgacgacagaaaacgtagccatgaaatacgaagcatggggttggaaagtcatcacaatcaacggaaacgatgtaacggaaatccgccgggcactgaccgaggcgaaagccgaaacatctcgtcctaccctgattatcggtaacacgatcatgggtaagggtgctgtgggtgctgacaagagcagctacgaaaacaaggtgtctacacacggacaacctctttcggcagccggcgtctctatcgcagacaccatccggaacttaggaggaaacccggacgatccgttccagatcttccccgaagttgcggaactatatgccaaacgtgccaaagaattggaagcaatcgttgcggaacgctatgcggccaaagcagaatgggcgaaagctaatccggaactggccgccaagatggatttgtggttctcaggcaaagcacctgtcatcgactggaaggctatcgaacagaaaccgaaccaagcgacccgtgcggcctcggcaaccgtcttaggcgtgctggcaacccaggtagaaaatatgatcgtttcttcagccgacctttccaattcggacaagacagacggcttcctgaagaaaacacatgcattcgtaaaaggcgatttcagcggtgcattccttcaagccggtgttgccgaactgacgatggcctgcgtatgtatcggcatgtcgctccacggaggtgtaatcgtagcctgcggcacattcttcgtattctccgactacatgaaacccgctatccgaatggctgccctgatggaacagccggttaagttcgtctggtctcacgatgccttccgcgtaggcgaagacggaccgacacacgaaccggttgaacaggaagtgcagattcgtctgatggaaaagctgaagaaccacaagggacacaactcaatgttggtattgcgcccggcagacgtgaccgaaacaacaattgcctggaagatggctatggaaaacacagccactccgacagctttgattttctcccgtcagaacatcacagacctgcccgcaaaaggaaaccgctacgacgaagccttgcaggctgaaaagggagcttatattgtagatagtgacgaaaaccctgatgtaatcatggtcgcttccggttcagaagtctccacactggaagaaggagcagcattgcttcgcgccgatggcatcaaggtccgcatcgtatctgttccgtctgaaggcttattccgcagccaaagcaaagaataccaagaatctgtcattccaacaggaagcaaggtattcgggcttactgccggtctgccggtcaatctggaaggattggtgggtgccaacggtaaggtgtggggactcgaatcattcggtttctccgctccatacaaggtattggacgaaaaactcggcttcacgggtcagaacgtatacaatcaggtaaaagaattattgaattaattttcagatttatgatttataatttatgatttatgaatagttggtaaatcataaatctgaaattataaatcataaatctccaaactcctctaacagataaatatgaaaacattaggtttatgtagtgaccacgcagggtacgaactgaaagaattcgtaaaacaaatactcgactcgaaagggttggcctataaagatttcggaaccgactcgactgaaagttgtgattatcccgactacgcccatccgcttgccaaagctgtagaagccggcgaagtatatcccggaatagccatctgcggatccggaaacggaatagccatgacactcaataaacatcagggaatacgggccgctctgtgctggcaagaagagatagcacgtctcgcacgcgagcacaataatgccaacatactcgtaatgcccggcagatttatcagtcaagaggaagccactcatacggtcgaagcctttctgagcacctcgttcgaaggcggtcggcatcagcgcaggattgacaaaatccctttgtgaaaaccaattcctattgccaacgatatgggatatccccacaaaagttaaaaagagaaacaactatcatactatcattgaggttcgtatattgtttaaaaacaggacattatagtatgatagttgttgttttcaactatcattcatctatcattcaactatcattcaacgatcttttttgcgcgcgaacaaggctggattcacccaataatcatcggagattaacacaaagacaaaaccaattgtagggatcaatccaaagccgatagagtgataaccgctatacttctatcattaaactatcatatcatagagcttttgacctaagtcgaaaaccttttcgaccttgggcaaaaaggcttttgacaaggggcaaaaaggttttcgacccaggccgataacagaaagaactataagattagattcaattcactttaaattcttgttttattgaaagttgtagatatttatgtatattcgagccgcagttcttgcaggattatggttaagccacccataccgacatgaagatcttttaaaccttaaggaaaccgcatcatcattcgtcgcaaacgaattgctttccaccattgcttttgggaatcgatagagaaaagaacaaaatcgaactttccaatgattgcctcttccgaaataaaaccaaacgaccggctatcatgcgagttcatcctgttatccccctccatataataaaagcgttgcttgggtatatactgcgagctgctctttccatcgatatatattttcccatctttctccatcactttccctccgtcacgcaaaatcaacgaacgataaagaagaagcgttcgccggtcgatccgaagaggctctcctttttttaccacccgggtaattcgcttgaccaacaacaattgcggatctgccgggctgttgaacaccgcaatatccccctgtttaggttcgctgtaacccggcaaacgacgatactcccaatgattctcttcatcagcaagacgcagagggcgtatccaagtaaagacattcagcaacgggatatccgcccaacgagaggggaatcgtccaccataagccagcttgttaatccaaagccgatctccgcaaagcaacgtcggctccatgctccccgaaggcacagtacatggctccccgatcaccatacggataaaacagcatagcagcaaaataccaataatgaatttccccgttctcattcaacaacaatagattttatgcttttctttgtacatagcgcaaataaaaatcagtccctttcatccttaattttaaacgatactttttcattttttcacttcttaaataacgtaagcaatgtcacatcatcgatattctcagcaggacgccgattcaaataaaacaaaccggcagtaactgataaaacaaatgccgaaactattatattgatcatgctgattttcatagatcctttattttaaagaataccaaaaccaagttatcatcctcctttacattctcaaataatctcatattttcctctttgaccggataatgatttttttcaagttgagatttcaacatcctcaaggactgaggcaagatcattgcgataaagtaatcttcgtaagcatgaatacccgcaataaaatcaaaaataaaatcagtatcacactgtattccggatacttgcaacaattttttagaacgcttgtcataaatcgataccaaacgttcatttccattatcacttgtaagaaaaaacaaatgagttgagttctctgcaaaagtcgataaataggtatgagaagaacgataatctcttaattcatcataattttcaaaagtagcaattttttccttttcaaatggagtaaactcgctgtaatcaaatttataccgaagagacaaagtggtatccgttaccgtataaacttcattcaaatacatcggaacatataaaatatcattttccagccttcttacagggtcgtagaccaattgattatgctcactctcttgataatagcaggctgctttctgcaaattccccaaactatctgtatacaaaagtttataatcggcaataggacccaaatgattattccaatcacccttgctcgtggctgttatataatagcctgtagatgatatttgaaaattgcaaatagtgcggaaaggaacatcatcagaatctatataattcccatctaaagaaaaatgcatccacttccgtttctgattgtcataaataacaatttgctttttttctcgatcaatagcaaatgatcgaggtttaaaaaattcaaaaggagctcctcctttttcacctattgatttcagaaacttaccattttttctgaaaataaaaagcttttccgtcccagtcctgtcaaacacaaaaattttatcttcaaaaacttctatctgattacaataagcaaacaatgattcttcaattgattctaacggtacataaaaaaaatcttcaatcaattttgaagccggaatattttctccaatctcattggttacttttatgatctcacctttctcttcagatataggaacgatttcaatacgacctgcatctactgccggaaaaggcctgtttttcataatcaactcttgacaactgcaacaaaacaagacaaaagctattagtacatatttacttttcatgcctaaattacaaaaaaaacaattaaaaggaaccatttcaattcataaagaagacaaacatgctttcattaccaaatccaaaatggcttccacataaatcataaaatcaatcaattatacaaacattccgtttttgtttcttttaatgtccaaaaccatccactccccgatgaactggatccggatccagaagaagaactggtctgtgccaaggcaaatgtacttagactattagtacccataccgtaatcattcagcgaatgccgaagattcattcccacacccagcaacagagcgactgctccacaaactgataagatttttttaccatttaacataaccttaaaattttaattgtctataaatgattacttccattcaaccttttttctaatacttcttttgtgtatttcttcaccatcgttgtgttttcccacttttttgtataatgaaaagtatatactgacaaaaagaaacaatagaagaaaagaaagaccaaagcagctttaaaataagataatcgttttctcaaccaccaaattccatttgctataaggaaagcaatgccaacataactcaaatacatatatctatcggccacaatggcatgacgagacatattaaaaagatgtattgagaacaataagttgacaagaaacagcaatacaccgaataccaaatatcgattattccgataagctatgatccaccccataagaaacaatagcactaccggataaaggtaatagtgtaagggcggttcctcccccaatactataggaaatggataaaagaaattcaaattaacgggcagcaaacttttagtaatatattctactaaggcaaaacatccaaaaagtaaacgctgatataatgggaaaatcatttcataaggccctttcccttgagaaagaacagtaataattccaaaaaagaatgccataatgagaaacgacattttctcactccagacctcaagatttttcatattccggttcgtaaaccaatcgacgatcaacaatgccagtggaaaagtaacagcctgttcctttccccaaaaagaacaaagaaagcaccctatcgttaatacataataaaaaatctttgatgttcgtatataacgtaaataacaaagtagccccaagagatagaaaaaagcatataacaacactttcaacgcactgatccaggcaacagcctccacgttaatcggatggactgcaaaaagaagcgttgtaataaagtttacatataaaatttgcttttcactcactcctccatgcacacgtagaagggaagagattaatttccaaaccaaacagacacaaccgatatgcaacaacaaactaaacatatgaaaataaaagggatcatagccgaaaccggcatataacaccaaatagctcaaaaaggcaagcggagcatactgcccaccataaaaatcagtgaagatatgccacaagttatcgacagtccaacctctttccgtataatggctgaacaccatccattgatcatccatcccgtaaggaagccgttttttaatgtgggataataaaccaatagattgattatcaccaaaatatgaattgataaaaaacttcatcttaattgcttttattatttaaatacgaagtagaacaaactctaacagatattagataataaaaaggcctttcacatattacgaatataacatatatattcataaaaagaaaaaaaataattagttttattgagaaaaatataattttgttgctatacagtccaataatagcttgtcttccagtctttttctagaatgtttctctatatccggaaaagtttgtgtcacgccgcccgttacgacaagccgtttctcccaagaaaagggcaggcaataccggcggacatggatatgggcaaaactacccgtacatgcaatgcagagggagcaggagagccttcaccactatcgaagagagaaacggtctcatgccgggcaacatgataggtcaaccgtatcttgaaaccgcattgcctgccaagttccttcaatatgagattgcatctactgtgcccggtaccggaaatacatgaccgtccttggacagccacttggacttctctatgatgcgcttgggcacgtccagcaggcggatgttggactcggtgttcgtcttgcgccggcgggtgatttcttcttcgtacgcaggaaatactcgaagttgttgaaaatgaattcccggaataaacttatttacataaccattggcgatttatatcataaaaaagcctttcacaggcaaacgctgtaaaaggccttttagcttgtgacctgggaggggctcgaaccctcgacccaatgattaagagtcatttgctctaccaactgagctaccaagtcgatatttgtcgattttgtttctattgagtgacctgggaggggctcgaaccctcgacccaatgattaagagtcatttgctctaccaactgagctaccaagtcattcatgctatcgttgtttctcgattgcgggtgcaaagataagagtttaatttttcttcgcaaactttttccgcgttttttacacaaaattttaatcaaattcaaatatatcagacggtgtagtccgtttcagagcatgcagggaaacatcctttccaacccgtaccccttcttgaaacaggcggaaatcgactgtcttataagcaagttcgggatgattattgtcacggctcaggtgacacaaccagatatcttttaatttgggatcataatgagttgcgaggaattcggcagcttcacggttgctcaaatgtccggtcgggctggctacgcgttccttcagaaaagcaggatacgtgccgaattgcaacatctcctcgtcataattggcttctatgatcaggtggttcgccatgcccatgtatttacttaccgtttcggtaatatggccgacatccgttgccaacgtaaacttatgatctccatattcgatataataacccacattatcggtactatcatgcgggacttcgaaagcagtaatgcggaaatcgcggatcataaaaggcacttccttttctatcaccttacgcgaactgacaagcgtttcctccacgtagcgactcttgctgattcctcggtggacagcctctgtcgtataaacaggaatacaatgtttctctcccagacaacctacagtcttgatatgatcggcatgatcgtgcgtgatcaggactgcaacaattttggagaaatcgatcgctttatctttcaacaccttctttatggtacgaataccgatacctgcatcaatcaacacgccgaattcgggcgttcccagataatagcagtttccactgcttccacttgctaaactcagaaatgatagtttcattttaatttccaattcagtccttaagaggaattacgggcgaaatgagtcggggatcgtcacctccccgatcagcgaacagttcatgtggtccttcacctcttccggcgtcaagccgtggccgaaaaggaacatgagcttggtaacagcactttcggtcgtactgtcgaaaccgcttatcactcccgcttccaacaatttatgaccagtctcataccgatgcatttctacacttccggcactacactgggttacatttacaatcacaattccccggctcaccgcttctttcaacatcgtcaggaaccaatcgtagcacggtgcattaccgcttccgaacgtttccatcacgactcccttcagtcccggtatgttcaggatgctttccaccacctggggagaaatccccggaaaaagtttcagcaccgcaatattccggtccaagagataatgcggcttcaacggctttctcgaaacaggatggtaaacctgcccggtgtcatactttatatagataccggcatgtgccagcggcggataattgtatgaacggaaagcattgaagttgtccgcattgatcttactcgtacggttacccctcaacaagtcattttcgaaaaagatacagacctccggcacaaccgggacaccgttttccttggctgcggcgatctcgatggcggtgatcaagttttctttcccgtcggtccgcaacataccaatcggcaattgcgaaccggtaaagatgaccggtttacttaagttttccagcataaaactcaaagcagatgccgtgaaagacatcgtgtccgtaccatgaagcacgacaaagccgtcgtacaactggtaattgtctgcaataatctttacgatcttcatccatgactccggccccatctccgatgaatccatagccggatcaaactgaatggtcgaaaccgcataccccaacttcttcagttccggcatattatccttcaaatgttggaaattgaacgattccaacacgccggtttcgggattttcgatcataccgatcgttccgccggtatagatgagcaggatcgaggctttctcactttgaatgtttacacttgctgtcatatcgcaaagttaataattttattcttctccttttaatacagggacgcttatatgatattttactgccactatccgtgaaacgaatattccggtagcagcaataagctgcgtcagtgacggcccgatacccatctgtaagcaagcgtaataaataatgcctccgaacacgcatgccagcgcataaatatcttttcggaaaatcagcggaacctcgttaatcaggatatcgcggatcataccgccgaaagcccccgtaatcgtccccatcacaatggccacccacatcgggaatccgaatgtcagcgccttctcgataccgaccacgccgaacagtcccagccctatcgcatcgaaaataaagaaagtattgttcaagctaatcacatatttcctgaatatgataacgaagagcaacgccagagccgatatgatgagataagaggcttgttccatccaaaaaggggtggcattgagcaggatatcgcggatcgtaccgcctcctaccgccgtaaccacaccgacaacataggccccgaaccagtcaaattgtttggcagaagccaaacggatgccgctaatcgcaaaagcgaatgtcccggtgtaatcgcaaaacgtaataaagtctatcattttgattttttctgcaaaaataagtatttcctcgcaatgttgcggttttctataaagatgacctgataattatttaaaccaaacgaacatccggttgttaattatatataagtttgcattcaaaaaggtgctgatgactatctaattaagggaaaaatgaagaaatttatactaaccggactcatttgtctgttttcgttcccctggatacggggacaagaatatatacctcaaattacacatcgtcattatacaagtgactcaaccctactccaaccccgccgcccttggaaagcggcactcgaaacattcggactcaatatgctcgtctggagcttcgaccgatatatcgtaaaagaggattgggcttatatcaacgggcatacgatcaaaagcaatttcaaaaaaggcccggtatgggacaccgaccagttcacaacaaaccttttctcccacccttatcacggttcactctatttcaacgcagctcgcagcaacggtatgaacttctggcaatccgccccgtttgcagccggcggcagtctgatgtgggagttctttatggagaatgaaccgccttcgatcaacgacatgctggcgacaacgttcggaggaatcgaattgggtgaaatcacctatcggctgtccgacctgttcatagacaaccgttcgtcgggagccgaacgtgtggggcgcgaggtattggcaggcattttgtcgccggtccgcgccttcaaccgtatcatttcaggagaagcctggcgacacagttcttcaaaaggacgaacctactcttccgttcccgtcaattttatcgtcacgatgggacctcgtttcctcgcagaacaagaaggttcgaaacggggaacgaccagtctgaacattaatttccgcatcgactacgggaatcctttcaacgatgatttttattctccctatgaatggttccgcttcaacttcggaatggatttgttctctgcccagccggtggtcagccaggtcaatgccatcggagccttatggggaaaaactgtttggacgaaagggccgcgttccctttccgccggattattccaacatttcgacttctataactcggagctccgcgacggaagcgacctgaccgttcctccttaccgcatcgcagcaccggcagcagcaggaggaggccttatctattacaagcaggccacatcgggagacaagacggatatttacgccgaactgtatgcaaacggcgtcgctttgggagccagcctttcggattatatgctgcttggcgaacgggattataacttaggaagcggctacagcaccaaggccggtgcaggcatcatctacaacagacgattggctttcctgctcaacatggaaaactatcatatctttacctggaaaggatatgatccggagatcgactggtcacaggcagatcccggaaccctgaacattcaaggcgatgcaggaaacgcgcgcctgaccatcttctcgatgaaactggcttatttattaatggacaagtggaacatcaccctgacaaaccgctatttctcacgacggacaaactaccggtattacccccgggtagattattccacttacgacctgatgctcgggctagggatacggatttaattcttacgctccaactcgttcagattttccattttcttgcgttgcagaaactcgtagataccttcgagatgttccgtcactttcttgtttccgaattcataaactttggtcacaagaccgtccaggaagtctcggtcatgcgaaacgacgatcagcgtcccgtcaaagtccatcaaggcttgtttcaggatatctttcgtcttcatatccagatggttcgtcggctcgtcaaggatcagcagattgacgggttccagcaatagtttaatcattgccaagcgggtacgttcgccaccggagagcacctttaccttttttgcagaattctcgcccccgaacatgaaagcccccaacaaatcctttattttgttgcggatatccccttttgcgacatcgtctatcgtttggaacactgtcaggttttcatccaaaagggaagcctggttctgcgcaaaatagccgatcatcacgttatgcccgatcgtcaacgtgccgtcatgctcgagttctttcatgatacattttaccagcgtagatttaccttcgccattctttccgacaaaagcgatcttgtcaccccgctcgatcgtcagattggcattacggaaaacagtatggtctccatacgatttagacacattctcgatcgtcaccggataagaacccgaacggggcgaaggcgggaacttcaggcgcagagcggaagtgtcttcttcatcgacttccagtatttccagcttttcaagcatcttcacgcggctctgcacttgcaaagttttggaataagtgcctttgaaacgctcgataaagtccttcgtttcagcaataaacttctgttgctcgtcgtatgccttctgttgctgctcgcggcgttccttgcgcagctgcagatattggctgtaattgactttatagtcatagatacgccccatcgtaacttcgatcgtgcgagtcgtgatatgatccacaaaagcccgatcgtgactgatcactacgaccgcttgcccgttatcgatcagaaaatcttccaaccactggatggactcgatatcgaggtggttggttggctcgtccagcaaaagcacatccggtttcttcagcaacagttttgccaattcgatacgcatacgccaaccaccgctgaactcgcttgtctgacggttaaagtcttcacgggtgaaaccaagccctaacagagtcttctctatatcggcgtcataattaatttcctctatggaatagaatttctcgctcaatgtcgatacgcgttcgatcagttccatatagctatccgattcataatcggtgcgtgtctccaattctttgttgagagcagcgatctccgcttccatctcgtgcagatgggcgaaagcctgagcagtctcttcaaacaccgtacggccatcttccgtcatcaaatgctgcggaagatatgcgataacggtatctttcggagcagacactttcccgcgagtcggttcacgcacacccgccaatatcttcagcaaagtagatttacccgccccgttctttcccatcagggcaatccggtctttctcgttaatgacaaaagatatatccgaaaataatgcgctaccgccaaactctactgttagtccgtctactgaaatcatataatataaatgtattgcttttataaaacgaccggcaaaggtagtaaataaataggaacgacaatatttcagccgttggttcaaaagaatgacaggatatactccaaacgggtacaggatgacaaacttactgactgagctttgttatcccgtccggtcgaaaagaatgatttatttcacgacttccggacgtatcagaccaccaccgatcgaaacccgctccttccctgccagagacatatcaataatgtaagaatttcgctggttcacttctgtccgactcttatgggcatggaaaatatagcggtatccgcccgatctgtccaggaacggtgcaccatgaccggttccgacaagttcttccactttatgcaaaagcggatttttctcgcttttcctccatggaccgaaaggagaatccgaggttgcataacctacggcataatcctgacttctgaagtcatttgcggagtagaacatataataaagcccgccctgcttgacaatagaaggcccttcaaccacctttccgaacaccagctcccacggttcggtagcttcaacacattgcgtcaatgtttcttctttgatctctttcagattatctttcagctccgcacaccaaatcacattaccgtttgtaaagcaaacaaaataaagataggctttcccgtcctcatcgaaaaagacggatgtatcgattcctttttcttctcgaatcggcttcttttcatcttgcacaaatgggcccaaaggagaatcggacgtggcaacacagacatgttcctctaccgaatagaacatataaaacttcttatcctcctccacatagtagacctccggcgcccaaaaccatttatccccgtaagaatcttctttactcagtgccaggcgcggagaacgctcccacgatttcatgtctttagaactgtacacctcgaaaccgtccgcacgggatgttccataggcataataggtatcattgtaaaacaggatataaggatcggcaatcggcaacacatccgaaaccagttctttctctaaagcagtcatatttaccgaaacaacacacaacagcatcaatagcattttcttcaacgtatccgtcttcatatttgataattgagaatttcacacgccgacaaagataatcaattattttcttctacaatatatttgttttgtttatgaaaattcctatctttgcacccgctaatacaaacagcttaaattaattattcaaacatggcaacaaaaattagattgcaaagacacggtcgcaaaagctacgctttttatcagatcgtagtcgcagacagcagggctccacgtgatggaaagtttattgaaaggataggttcttataatccgaacactaatcctgctacagtagatttgaacttcgaaagagctttgtattggttacaggtaggtgcacaacctacagataccactcgtaacattctttcccgcgaaggtgtttgcttgaaaaaacacttattggaaggtgttaagaagggtgcattcgacgaagctactgctgaaactaagtttcaggcttggttgaaaaacaaacaggcttctgttcaagcagtaaaggacaaagatagcgaagctgcaaaagctgccgccattgctcgtctggaagctgaaaaagaagcaaataaggcaaaagctgaaatcgtagctaaaaagaaagcagaattggcagccgctgaagctgctaagcaagctgaagaagcagctgctgccgctccggcagaagaagctcctgcagcagaaagcgctgaataattcgagctttgccaaaataaaaaagaggatatctgcaaagatatcctctttttttatcgcctttatctctcctcgcgaacattcgcagaagttaaaaacgcccgatcctacacgagaatcgggcgttccaaatcacaacatttccaacagaaatatatcaaaaccttattttttcagcaagaaattatctatctgctctacaaactgttcttttgataaagccccctgggctatctgtggtttacctgtcttggggatgaacagcaacgtcgggatactctgtataccaaatgccgaagccagctctttttcattatctacatttatcttataaataacgatatcgtccttatactgtgcagccagttctttcaggatcggagatactttcttgcaaggaccgcaccaatctgcataaaaatcaataatagcaggtttgtttccttcgtacacccattgagtctgattcttttcgtaattatatactttcgacaggaagtccgctttattcaaaacaatcacttccccctgcgctgatgacaccttttccgtttcatttttttctggttttgcagacatggagcaactgaccaaaatcagcgcgaccacaaccatcaataaacttttcaaacttctcatataaaacttattactatttaattattatcacttacaaaagtaacaataaaaagacacaaacgtttattctcagtggttaaaagaaaatgaatagagtgaaaagaaaaaatatccaccaccaaatttgattattcgaaaataatcactacttttgcactgcaattaaaaaatacttgcatacatattggagagatggcagagtggtcgattgcggcggtcttgaaaaccgttgaactgagaggttccgggggttcgaatccctctttctccgcaataaatgctgaaaatcagcaaattgcaaaataaacacccaattttacacccaagaatgtaaaattgggtgtttttgtattatttaagattagctttatggtaagttatataaaggtagtcaaatggagtttagtatactatcatttgactacctttttttgatttattctatgatgccgggtttggggattatgtgcataacgaatcgttggttatctttattccctctaatatcaggttgaactctaaatttacttgattgtccacttcctgaaattagaacctcacaatttccaagtgaatcgaactcaataccattacttgaccagaatttaattaaagctaatgctctttcatagctaagctcgtaatttcgtgtataataatcttttgacgattgtccttctatgataagcatatattgagcttctggaattttgcttttggcactattcataaaacggacgattgccagacctgcttttagtaatttatcaagttgctcttgctctatatcataaatattagaactataggtattaaaagaaacttcaatgtcttttaatgtatgtctcttaaattgctcatcgtatgcgaaatacttattatctatctctttaatagagttatttagttcttcgatttttctgagctgttcctctttagcatttacctctttatctaattggtcattaatgcctttcatcttaacaacgcacactataaacagaacaagcataataaaaaataagcttgtcatgaggtcagaataacttaaccagaaagtattacttctgtttcttggcataattacttttcttcttttaagtccttgatagattttgtcattgtttctattgccttaagaatagatttgtttaactctatgctctcaagttgagcgttatgataatctgttcttaggtttaagatttcgcctttcatatccttataacattccgcttgaacttgcgtatattgtaccattgtatcaagcacttctttcaatttatcaaatgtatcaaagaactctttattattagccacaaaattttgtatatgttctgttgaagccgtaagttgggtagataagctttcagatacttgcttcccttcagatataaacaaatcaaattcctttctccaaatatcccttgcttctgctcctgttgggaaatgagtcgttatggcttcttgaaattcgcgttgaagttctgttgtcttgttttgattgctgaccaccacagacaatcctgtagaaaagtccttgaacttatcaatgattgtttgggtttgattaacaatacctgatacatttgctatgatagaattaagttgttcttgataagatttgaaaacatttaaagaatcggcagaatcttttaactgcataaatgttgcagctattttattagccgtttgcgtaaggctcagtttatttatttcggctaagacaagatgctgtttttcaagattgtcattcaataattctgccgaatcagcatacgcatcaagattgcgcccgaacttgtccacaaaatgtccaagtacaccttttaatgaatttagacttgaagccatactatttgataataacggcatcaactctcttctcaagaagttcatgtattcttctttgccctcattggatttggctacagcagatttatatgatatagcactattatatacagtaaagcccaatcccagtaaacttgcgcacatggctgctataataccatacaaaaggtgttgcaatccacttaaattatcagtttcgccaaaaatctgattgaaatcaacccctatcagccccgtaattataccaacgaatgtgcctgctaaacctaaatagagaggaacgttaaggctattatgtatttcatcttctaatactcctttttggctattacaaatatcttcaagtattcccaaatctgcgcttgttccagtgtttttgcacaaatattcatttgtgcgataaataatcaatcctaatttcccatagatacttctgttttgaggaactattaacgataaatctgtatattcatcaccgctatcatcttcatcactataacgggaaggtatgttctgcaagaacttctgtaatgaggacttattttgcaagataccagacgttatagatgtttctttgagagacaaattttcaacatcttcaaatagaccttccaattctgaaatctttttctttgttttaagaaagctatagatttgggctgtaataacaatcaagacaactattatagcaataattaagccgatatattcatgtaaattattcattgtcattatatttttgattatttgatttcgtcgaacaaattgttggtttgttcctttctcttttcttttgcttttttctttaactctttcttaaattctttttctctgatttttttctcttctatttcctccttgttcataggcttgtaatcatccatattatcaggatatttaccttctatatataattttactaagccagcatgagacataggttttgaaatatcacgaaaatctatatttgtattatagtcaagtaagactatatcttgaattttgctttgtttctttattctctctacaacatggtggacttctggcacattatctaacacccatttataggtaggaagataaatgagcattcttgcttcaaaataccccaacagttctttgctgtatgcacctttactatgccctttgggtataccgtatttccgtaccgttcttttcaaatcacgcatggtgtcattcttaaatgttgcaaaatcaacgcctgcaccttcaaagacctttaacccttgccacacagcttcaacacaagttgcctttaatccgtctgtaaaaggaatagggatgttcctatgaggataaaatggactcagaatctttgcataccgagtctctgagttagaagtgatatccaagattacagcgtctggatattcttcttttatcttctccaattttcgtttcctactttctatgtatatcataatcaaaaagtatcaaggtttattatatatttcttgggaataaatgtcatgaccattacttccgcttggaaatacggccgttcattttcgtctaaatcaaaatgtttatgtgccttaacggtggaaaaatgtattttcttaaaatcttctaaggatttgccaatattaggtgttcgtttcgtagttgtagcattcatgtctgcatacatcgtatgctgcaaatataccacacttggatctattcttagaatgacaggattgctaattctcccatctttcatggcaacatacatcataggatgttctgttgtgaagctcaaacgaacatagtcttgtaagctccgcatctcatccaaattacggcttaattttccgcctccgggattcggtatgtcgattttatgtttttcacaataactccaagacagcaaccctccatgccgtttaatggatggaatattccttctatctgtaaaatgatataaatagcgaataccattgctttccaatacttgcttgaatgcaagccaattttctttgcgttcagcagacaacgattccaatctttgcctttccgcttgttcggcttgttctttttttcgggcttcttccgcaagtctatttgcttcctgctgtcgtcgtattcgttcttctgctattcttttttcattctctatcttttccttttcttctctttcttttttcttacgttcttcttcctcttttcgtttttgctcttcggctaacttaacaaatctttcatgttctaattctttttctaattcagataataatttttgtagattagtgtattgttttcttataatcgaatcttttgtacgcactatttcatgcgcaatttcatccattatttgctttgccttttgacactttcgctgtgcaataaggatttcaagtttatccaataataattttgccttttcctctcgtacttttaattcatatgtctctttccttaatcttttatcttttaacgcttggagagaaagtatattctcaaatttacgtggtgagaatacacgagtttgtaattcatctttttggggaggaatatttaaaacataccaatcagttgatgattgtttaagtttgtccctattttgctttacacgttcttttcttttgtcaaattcatcacaaagcgatttaggtgcagatggcttgagttcaccttttgaagagatttcagttggtgaactatcatataatccaaacagttttttaagccatttaaaaatcatattatataccttataccttttagcacgaagcgtggaactgtaatgccacgtctttgaatgaaggtcctgagaaaacctttgtgtacagatgtaacaatagcagcccacgctatagcgtgagaaccactatgctattcttgtacacgtttgaaagtttctcaggttttcattcgcaagaaataagcataacgcttcttcttaattctaatatgtcttggacagagttgcctcaatccgcttacaaagatatttaattttattgagatacaatcaaatactatcaaaattacattctgaatcctctactttttcttggttcttctgctgattgtcgtaaaccttgccttaatttctcccattgctctttgaaccattcgctgattggttgtcggtttatagtcagcaccaacttattatcatcaaccgaatttttctccactttgaaaatgtcattcttgatttcaaatcttcgtctatgctcttcggaatagatttttccactacacctgatagcttcttttttggtcaaaagactgtttaccatatccttggtaaatccaatggcatagcagagcttttccattctcaacatctctttgagtaatgggaaccagttgaacgctttttcaagaatggtgttcaagcgtgatatttccttatctttggcttcaagctcttgattatgtattccttgcaggttacgaatctgcttgccgtgctgttcctgcatttgttgcatcttggcttttaattcatcaatgtccttgtcacgcttggcaatttcatgacgtaaattctcgttagattgttccaaatctttcaattttccgctgccgaaaagagaaccgacaccgcttgctatggctgtggctgcatcagtggctacacttttgagcttgtcggtgcgtatctctgcttttacctgtttgagttcctgctcggcaaggcttacctgttgctccttgtgtcgcttggtttcctctatacgttgcagttcggctttttgcttctcaatgataaagtcgtttcgctccagatgctctttaccagtgacagcttttgcctgcccacgttccatcaggagaatatcggaagcaagggtctgcatggttgccatatcctcgtcattgagctttcggctctttccggtttcatggttcatccagtcgaatacgacatgtgcatgataatttggtttgaaccatctgttaccgacttggaagctctccttgtcttccgctcccggctgaccgttcagccaatgcccttcgtctttgtgcaggaaaatctgtagcggagtgataccccagcgtctttgacactcttcactgaatttgcgtacatcagccagtgtggtgtccggtctgatgagcaatactccttcacggatgggtgaacatcccgccaccttgataatcttcccattctttcccttgcgttcccgttccttttcctgcatggcacgtccggtattttccttgaccatttgcttgatgttgtcatagtgcgtccgcagttcgggagtgccgaagtcgggatttatccactgttcgttgtcggtggaaagttcgggaacgacatagattctggactccccgatattacgcatatactcggcagtccttcggttgtgcgcctcgctcgatgcgatgttgcaaggcttgatatgtatgcttgattttgttgccatagcttcttttctttgtttgcaattgattattttgctcgcttccgcagtggggctcttaggggtaacccataagcggagatagcaaagagagggtcactctttgctcggggttctcaggggtgaaacgccctgagtgggtcattagggcaaagccctaatcccctcgggagagcccacaactacgaaagcggagcgtgtagttatagtgggctataaccgaaagccgtttttctttttcggtgactggctgcgcacccctttgtcggattgtacttgcctgtttctttcaacctgtttctgtaagtattcgttcaagtccttgcatccgctgtaagtctgcgaagcgtcacggatgtatcggtctctgccgtattccttgcggatttgttggagtgcttccatgcctgcatggtcgttgtcgaaaaagcagtggatgcgttcgtaattgcccaacgggtagagagccttgtttacattcgatacggagttcaatacgatgtagtcctgtccgtccaactccggataattcgggcagctctcctgtctcaatgtcagaaaggagagatagtccatgaatccctcgaacacataacaggtattcctagctttccccgactgtctgatgtgggagatttcctttggggcgatgcagcccttgaaatagcggttgcgaacctcaaatccacccgatacattgggaaaggcgatggcaaagtaccgcttaccgttgtgggtgaaacgggcttcactacattctcttttcgtcagttctatgttaattcctctaccttgtaagtaggcaagcagggcaggagatgacaacggaactatttccaactgttggaagcacggctcggaagagctttgcttgccaaaagagaaagataccgggcgcacgtgtggtgtttgctccgctatccgtttcaagatgtaaggcacatggtcggtagcgtacaggtgtgcagccagttcaatgatgccaccacctttacccaaaccgaagtcataccattgttctcgttcggtattcactttgaacgatgcttcagtctcttcccgaaacggagatttataccatagattgataccttgttgcttgacgggagaataacccaaactatgcagataatccgctatccggatttgcttggctgtctgtatatccataaaatgattgttttagtagttggtgaataggtttatttttcttttcgcccgtaccttttcagtaagtacggtctataatgtaataagcaaattttaaatcgacaattttcggaaaagtaaaatcgacacaaataagtcgagacaaaatgttaataatatcaattaaatactatagccaaaccctatttaaaggggattatccttattctttatcattgtcaaagatggattttctatttcccattctgtagctttgtccagagagtttaatgacttcacaatgatacaaaagccgatcaagtatagcagaggcaagcacttcatcatccagagtttttgcccattcagtcggagccttgtttgttgtgattatcaaggacgctttctcatggagagtgttgattaggttaaagaaacccgctgcatcttcttttttcacagggaacagcattatatcatcaatggcgacgaggtcagctttcaacaaacggttgtaggcagtcatggcagatggcatcagtgttttcattttaatggtgtttataacatcttccatcgtaaccatgtatgccttgtaaccttgcgataccgcttcatagacaagtcctgccgcaataaatgttttcccggtaccggatggtcccatgagtatcagattgtaattctgttcaagccatccgagatgccttaattcacgcagtcttggtgcggttatgccttgtgagtaattatggtcgaaaaggtctaggtcgtgtcttgacggcagagaagctgcttttagtcgccgttgtaagtctttgctatccctttccagaacttctctagcaagcaaatcatgtaaaaattcaacataggtcttgctctgttcccgtgcaatatgggcttcggattccaataacctcggaagggcatacaagcgtaaacgcgagcataaatttttaatctgttcgttcattatcatataaaaaaggtattgaatgttgatatgtctgttttatcgggcaccatggaagaggtatcggaggatgggaccggctctgtttctacaggaacttccacaagggcctctcctttgtggactctgatactttcggctactttcatcaggctacatccattaaagaccttcacttccaaacatcttgtaaaggcttctatcaacgtgggttctgtatagaagggatatcggagaagtataaactgcaggttgtctctatagttacgattcttatgaatgcgtagttcagataaataggtatcaatgaccgtatccccgggaagtcttttacggacagtagcctcgtaatcatccaaggcagcttcacggtctcgccgatgtgaggtattacttattaactgtcctttatctttgcagattttgtgtgctgctatatttttccctgtttcaaggctgtaaatatacagcatctcttccttttcttccagatatacctgtgttcggtgaccttggtaggtacctgtaggaacactgtaatagttccccttgtaggtaatcacgttatccttcctgacatgatggggtaaaagctttggggaagggattgtcggaattccccgataaggcatgagatggggtctttccatctcgaactccactgatgggatacgacgtatgccatgatgctccataccgttagcagtacgttgcaaccatgcttgaacctcctcgttgagttgctctatggaggtaaattcacgtccccggagaaaattgtactttacgtacttcactacgttctctatctttcctttgctttcgggatctgatttacggcagaacaccggctcgaacccatgttcacgaaccaaggctcgaaagccgtgggtaagtatcaggtctcctaggttctccttgacaagaaaaaccttgtcctggtcataaactattttccgaggtactcccgagaaatattcaaaggcaagttcgtgggcataaactgcaagatcggtagtaaacggggtacggctgaaataaataaatttataacggctacggctaagactcattgcaaaaaaatatactttcaagggtatgccttgcgaagtcttcatccagcgttctccaaaatcgcattgggcatattgaccataaggtgtttccggttgcttctcataaggacggtaactcttttccaattctttgggcagattatgattcagacgtactcggttgacaaagttggataccgttttagctgtgacatggggaaggtctgtaaaatgttcccgtaaacggtcatggagttgcggagatgacaaaaatggccatttgcgtaactctccgataacataagcttcataatcatcaagtttatggctgtatcggcgctcgtaactttgactctgcttaaactcttcttctgtcatagacagatacttggacaccgtttgacggtgaagacctaatgatatgcctatttgactcttgtttaggccatttgaaaataattctttaactttgtaccacattagatacttctgtaatttggaagtctcactcatagcattgtgattagttgttgacaactctaatttacaatgctattttcttttattctattgtcgattttacttttccgatttttgacgatacaaaattaccgattacatataatcacttcactaaattctcgtatatataggatacggtaataaagtgaagtgattttgttccattccccaagcacttcactatattaccaatatatacgccccgagaataaagtgaagtgatttcagggaaacggtctaatagtggaagtcggacatgaatgtgtattttctgccgttctcctgtactatcatccgcttgttgcggagcatggtgatgagcgataccgcctttttatggttcaactttacacccacggacatataggtcttgattaaggcatcttccagttccttgtatccgtactcctctttcagaccgaaaacggcttccagggcgatacggtgctgctgctcggtgatatgcctgtaagggtcgaacttctcttcttcgggtcttcccggcttcttggcttcgggcttgtaaccctccatgagttcgggaagggctttgtcgttgatgcggaacgcaaaagactcaaagtccattgcccggatgtgaatggctgaaacatggctgatgtcaccattgcccttgtccttttctaccagtaatacggtttccgccttgttgttcaactccgtaccgatatgccctcttgcgttctcatcccccttgttctgatgcagtatcgtatggatgtgtatctgcctgtcatccgtccactgcatcagcttggatatgatgcgtgtggattcgccggggctgttgatgtcatacaccatatcccgtatgccgtctatgattacaagaccgatgtcgggtgtattgtaaatagcctgttccacaatcctgatacgttgctcaggcgtgtattttctcaaagcgagaaattcaaggttctcattgtccctgtcatcgggcaagccagccatccgcaaaatgcgtgtcatgactttcaggcaatggtaagggctttgttccgtatcaacataaagcactttccgcttatcttcgggaagttccgccacataccgcagcactgtgccgttcttcaatgcagcggctacgatagccgacacattgaatgtctttttgcttttggctttgccgatggatgcgctgaaattgcccaatgtcccaatgacagaaccatgtactttgaggatttcaggtgctttctcataacttttcgacaggctcaaacgtgaggcttgccaaaggataatggcttcttctgccgatatatccttggtttctttcatatagtccataaccatgcctcccgttatttccgtcctcctgttttctttccggcaagttcaagggcaagttccacatccacgataatcttgcgtcctatctgggtaatggctctgtcaatctttccgcttttcttgatgcggttggcagtgggcagactgcacccgaacagtttggctatacccaatattccgtacacatacttcctttctgtgtccgttactggttggggctgcgcttccgaatgaccggaagcgtgcttgctaaggtaaatgaactcctcgcctgtcatctgccagacgggttttgataataactcttgaagatttgtcatcgtccaatctatttagtcgtttaacaatcagccctgcgcactggctgttatttctgttctcgaacgatgcaaaattaggtagggttgtaagtggtaaggatgtggttagcgtaaatgggatgttctattattcaactgaatatcagagaataaaaataccactcaaaaattaatttgagtggtaaaagtggttgtttcgtaaaatgtcaggttgtatcacggattatcggaatattgtgtccatttctttggcaaacttctggttactgtcacttggaaaatcggaaacaggttccttgtattttgacttgtaatagttctcttcaatatccagcattttgaggatattcttcttccaattctccctgtcaagtttgggcagttgttcgcccatcaggaatatcagataacagacacgtattttctctctcggttttattttcagcttgcatttgtaggggtgcagattcatacaagtatagaaatcatattcggaaatattctcgaattgttctcccacacaggttgtgtgaacgagcgaaagcaactccatgtcgaaatattcgtgttgttcctctttgagagcttcctcttgtatatcgggggcacttggcttggatggttcttccggttcacgaatttcatcagggacatatttcgtcaatatctctttgaggtggcatcccaagcggtagatttcatcgaaacagcttcgtgcatatttaatagcttcttccttcgcctgtttttgtatgtcgtatagttctaccaatttgaccttttcttcctcgtattcagccttgcaccgttcatattccatttccgcacgctgttcatcttcggctgtatgttccctgtaacctatggaatcatatcggttatatgcctcatttaacggggcatggagtttgacggttctttgcctctgttcttctatcgcttcattgtatatctccgaaattttgaaacaggcattaatgacatactgctcgcttggcatacgacctttctcataaaagtttatgttttcacagacttcctttttcaagctattcagaagcagggtgtattgctcttgcggaatatgaagaaccagttcaaggatggcagtttcaagagccgttacatcattgtagtccaaataaaaccgggtgatgaacttctgcttttcaaaagagaaatccttgtttgcaaaccactccttgtatatcctgttcaattctccgtatcggggaatcagcgttgtaattatgtctttcatggtcggttaattttgagtgccaccatctttttcaagaaaggaagccagttcttcctccacttcttctatacttggcagagccgattttaagttttcaggtatagccttgctcagttggtaatcgctgatacctatcggctggtcgtagcctgtcaatgcgtattgtgccacaacttcgtcttttcccttgcacagcaacaacccgatagtcttattgtcattctctcccctcagtttgtcatccaccacattgatgtagaagttcagttgccctgcatactccggtttgaatggggtagcctttaattccaccacgatatatgcgtgaaggggaatggaatataaaatcaggtctgcatagaaatcgctgttcccgacttgaaaatgcttctgtcgtgcaacgaaagcaaagccattgcccatttccagcaagtaacgggtaacgtgcttcaccaactgttcttctacatccctttcgtctgccttttccttagttccagccaaatcaaagatgtacgggtctttcaacaggtagttggcgaggtcactttgcggtgcaggaagcgtggctgtgaaattgtttaccttattattgctgatttgtctgctgtacaggttggtttcaatttgtattttaagaacattgctgctccaacccatttccacggactgcttcatgtaccaatagcttacacccaatggaagtgaactgttaagcataatcacatggcttgcccaattggttcttgcaacaggtgatgccatgaatacgctttctatatccttaatttccatccggtaaatatcagatacggtttgggcaacattatggatttgcgcaagagcttcttgcatgattgtaattcctttgttattcgtagattgtatttgcgcaagaggctcttgcgtaaattgcgcatcgtttaagtagcgtacttcgtctgatattttctccacacttggagctatcaattttgcatccgtttctatgaaactttgcaatgccctcaaaggatatgctttggcaaattggcacatataggtaaggttgcgttccgaatatcctttcttttcaggaaaattcagccggatagcctttgccagttgcttgatgattttacttccccatccttgctgttgctgatgatagagaatatagttgcccactttccagtagtggaacagcatttgcgcattggctgcgacaatcagccttacttgcgcctgttctatttccgaaccgacagcgtgtatgaacgcatctaagttcgttttttctatgttggattccttgttgttcatattgtgataatggtttctgcaaatatacttattgataactgtttatgaaacttattgatacttttatagttgattgaacttgttcatggcattggctctaatatcatctgctatgtcaatgtagggcttcatggctttgtagtcgctatgtcccgtccatttcataaccacctgtgcagggattccgagagccagcgcattacagatgaaagtccttcttccggcatgggtgctaagcaaagcgtacttgggtgtaacttcatctatgcgctcatttcctttgtaataggtttcccgtacaggctcgttgatttctgccagctcacccagttctttcagataatcgttcatcttctgattgctgataacgggcaatgccatgtgattctcgaaatgaacatccttgtatttttcaagaatggctttgctgtggtcgttcaattcgattatcaagctgtccgctgtcttgactgtggtgacttcaatgtggtcgggcttcacatcgcttcttttcagattgcgaacatccgaataccgcaaactcgtaaagcagcagaacaagaaaacatcccgtacacgttccaaatattgtttgtctttgggtatctgatagtctttcagtttgttcagttcttcccatgtcaggaatatcacctttttagaggtggttttcaatttgggtttgaaagtatcgtatgcaatgttctgatgatgtcctttcttgaagctccaacgcagaaaccatttgaggaatcccatctgtttgccgatggtgctgtttctcatgtctttcttgtcacgcaagaaattgacatattcgttcaacccgaactcgttgaagtattcaaaggttacatcttccttgaactcttttaagtgttttttcaccgctgcaaatttctcgtatgtggatgccgtccaattattctgattgccacactcctttacaaactcatcgaacacttcccaaaagctgacaggagcttcttcctgctgttcttcacttgtatttttcatccgtaagttgaacgcatcttttaactgttgggtggtaggcatgacttcctgtacctcaaactccttgaacacgttttgcatttctgcatagtatttcagcaagtccgcattgatttcggatgcgctttgctttagcttgttggtacatccgttctttactcgttgtttgtctgcatcccatttggctacgtcaatccggtagcctgttgtaaactcaatgcgttggcttgcgtatatgacacgcatacggataggcacgttctctacgattggcacaccgtttttctttcggctctccaatgcaaaaatgatgttacgtttgatattcataattgggtgcgtttgaaattctacacccaaatatacacccaataattgagatagcaaaagacatttagaaagatttagttttaccctacatcttgattaatatttgattatcaacaaattgcaactttatgatattttctgaaagtataagttcgagagcctctttctccgctgaacgtgctggacagaaatggtcagcaaacggacaaaaagctacaaatcaatgatttgtagcttttttattgcccgaaagtcctgcttccaagacttcaaaagtacggtaaaagacaaagtttcgttactaaatcgttacctattccctgccggacaaaaacggtaacgaattgtccataaatgacctgataatgactatattagtccatagtctgcataactcgaaaacgagaggtaaaaactaattttgcaactaaaaaaagtgagttatgaaatcgacattcaaggttcttttttatttgaagaaaggttctgaaaagaaaaacggcgaggttatgattatggcacgcatcaccatagacggcaaactttgccagttcagtacgaaacagagcatccagcccgacaactggagcattgctgcgggcaaagccaaaggcagggatgccgggaggataaacgcccttttggacgacatacgttcttccctgaataccatttaccacgaaatgcagcggcgtgacaactacgtgaccgccgagaaagtgaaaaacgaatttttaggtcatagcgagagccacgaaacaatcctttcattgttccaaaagcacaatgacgatgtgaagcagcttgtgggcatatccaagacgatagcgacctaccgcaagtatgaagtgacccgccgccacctcgctgaatttatccaaagcaagtacaacgtatcggacatatccataaaggagataagcccgatgttcattaccgattttgagttgtatttgcgtaccgcctgcaagtgcggctacaacaccaccgccaagttcatgcagttcttcaagcgtatcatcatcattgcccgtaacaacggcatactggtgggcgacccgttcgccagctataaaatccggctggagaaagtggataggggttatctgacagaggacgagataaaaatcatccttaaaaagaaaatggtttccgaacggctggaacacgtcagggacttgttcgtcttttcctgtttctgcggtttggcttacagcgatgtcgccaacttgcggcaggagaatatccaaaagtcctttgacggcaacctttggataatcaccaagcggcaaaagacgaatacggacgtgaatgttcccctgctggatattcccaagatgattttgaagaagtacaagggcaagttgccggacgggaagatacttcccgtaatcagcaatcagaagctaaacgcctacttgaaagagattgccgatatatgcggtattaaaaagaacctgacattccaccttgcaaaacattgtacattttctatatagttgaatattaaacagttatactctacttatcactaagtaggtaacgatttagaaacgagcaaattacaatattccgttttcctttgcaccagtcaaagaacgattctttcaatgcaaatatacactttattgtctaaaaaaacaatcattttctatttttaattgacttacaatcaaccttaaagagagtatctgatttcacttcctccttttggaagaatgctggcccgctcatataatccggtatttttttaatttctcgtacaaggaggtccggctgataccgagcatcctggccgtacgggcacggttgccctctgcctcttcaagggtcttgagaagcagccgtttttctttctcctcttctgagagagaagcggtttcctcccgtccaacagtgaggtccagattcagcccctccagtgagatccatccgtctgcagagagcaggacagcacgttggatgcagtttttcagttcgcgtatgttgccgggccagggatatttttgtaatgagaccgcagccagactgttgaaaccgcgtatgggcttacggtgcttttcagaaaaatgcttcataaagaactccgccaacggaagtatgtcctccccgcattccgagagagggggggacattgatggtgaactcgttcaggcgatggaacaggtcctcccggaaacacccttcggatatcgccctctccaggttttcattcgtggcggctaccagacggacatcaaaggcgtattcccgggtagagccgacgggcttgtagcgtctttcctgtagggcacgcaacaggagcatctgtgtctcgggggaaaggttgccgatctcatccaagaacagcgtacccctatcagccgtctggaacagtccgcacctgtcaccgtaggctccggtgaacgtccccttgcggtgcccaaaaaattcagatttggcaagatcgccggtaatggttccgcagtccaccgggacaaaaggcttgttcctacggtggctttgttcatgcagttcgcgggcgatatgctcctttcccgtaccggaggctccccgaatgagcacggaaatgtcggaacgtgccaccagccccactaaccggtacatttcccgcgctttggcactctccccgcggtagaactcactcccgtcattccgagaacggctgaatatctttccgatagcttccagcaacttgtccggctggacgggcttgcacaggtagttggccgcccccagctgcatggcttccaccgcgttctccacctgcccgtagttggtcatgataaggaacggggtggcgtagaacctctcgttcatccattccagcagggaggtgctgttcccgtccggcaggcggagatctgcaaggacaaggtcgaattcccttgcggaaagggccttgcgggcagctgacagcgtcgtagcatgttcggtcgccatccccttcttcttcagccagttgccgatgctgcggctaaaaatcacgtcatcttccaaaataagtatcgttttcattcctgtctctctttccgcatcagttccgcataggatatcagttccctgacggcaccgattattttttctattttcacatattccttatcctcccattggcccgcgtcggatttgaccagcactctcagaaccgccaccggatagtccagacgtaccgtctcccacaacggcaggttcctgtggaggatggaaatgatttcccggctgtccttttctttcacggcggctgacagcctgtcgatgtccttgcggctctcactgacaaacagccccagcatttcctgccggttgtcctctccggcaagcaggagggagaagtccggcctccactctttcccattcccttttatgccccccatgatggcggttaccagcctttctgcagagaaaggtttatggatacatccggcgaaacctgcggagagatattcctcttccctaccggaatgtgccgtgacggctatggccggaatctccctcgcccgggggatgttcgagtccctcagcaattcaaggaccgagaagccgtccgcaccgggcatttgtatgtcggtcagcagaagatcatactcctgccttttcaggcagtccatcagttcccggacatccatgcagcagtcacagtgaatccggctgtgggagagcatctcccgggtgatctccagctggatgcggtcgtcatccatgaccagcacacggatgccgccgggcggttcacagaccggaaacaccttctcttccagaggggcggactgtccggccgagggcacgggaaggaaaacggagaagcggctgccttcaccggggacgctctttacctccacacggccccgcatttcagacacgagccgagccgtgatcgccagccccagtccgaaccctggaatgtcacgcgcgttgtccagcctttcgaacgccccgaatatccgttctttctcttctgcgcttattcccacgccggtatcccggacagagatgcaaagttccccatacaggtattccgcctcaaggcgcacctccccgtggggcgtaaacttcagggcgttggacagcaggttgtcggctatttgccggatatgcgagccgtcacagcagacgatggtgtccagaccggagaaggatacggtgaacattaggttcttctgcctggcggcaagccgatagccgtccgctatttcctcgaacaggactttcaggctgaagagcgtgtcattggaacggaccccgccttcatccatccggtggtattccatcagcgtgtttaccaggccgagcatgtaatcggacgagtgcaggtgttgtccagatagccggtcctgcggctgacgtcgctttccgagggcaacagctccgcgcagcctttgacggccgccagcggggcgcgcaggtcgtgggccaccgaggccatcagttccttgcgtgagcggagcagttcccgattcctcctgtcggactgttcaagcttcctttcgtaccggagacgacggttcaggtcccggtggatgatggtatacagcatgatcgccagcagggagacggacagggcgaggctggctaccatatagtaggagttgtcacgttcaaggacaaaggccttgtagcgtgcggtaaaacgctcgttgttctcccgctcaaattcggagatcatattgttcatcctcccgttcagctccacactgccggtgtacaggctgtccatctgtgccagtagccgggcctgcctttcggcctgttccagggcgaccctctcattcagggagaggagcatgcgtgttgtcgtcccggttggaggggtggcggacaatgactgccgtttacgttcggtctcttccctctgttgcaggtaagcggatttgttttcttttctacggaagatatcccaaatgcttcttttctttttgggagtatcttgctcaccggctcccggagaaaccgtattttccttttgccgcgcagcctgtttccgggctgtcgatacaatggccgggatgctttcctgcacaatgtcacctataccttgcagctcattgaaggtatgcatcgccttggcaagaaggagttccttgttccaaagaaggagacacaacgaatcgatatggcttttctgtaacggggtatggacatattccttcagaagctgcaggctgtcacaaaccccacggcgtttgcggctgtattccctcaggtcgtcatcattccatatgacggcaatctcggcatgggtggagaggtccaatagaccgatgtagctcttttcggccaggcgatgtatcgttaccagtttcttctcctccttgcgtagcatgtgtcttaacatttgctcctgacggaactgataaacaatgaagactaatagtaagattaaaattgtatagccgaaaaatatttttaattttaaccacatagtaataccaactgtaaaattttatataatatccatgcctaatagagtataaaatttggaaagtcacaatacaacctgattagtgtgtaatggaactttcatattaaatcatcttttatattaatgatgcactagccgaaaaaatggattctacgttttgaagaataaaatggaaaagctactgaatgtagtattgtcttctgtcgattagaaaacaatgatggtaaagcattgtacaaatattctgcaatagctcgaaactcatgctgagccccttcttgttcatgaaaagtcagatgatttacatcaaacacatccgtaaatttggccatggcttgtacttgcgtccatatcctgtcgtaagctacatcatctgtcccgctgcatgcccaaatgtagaaattattttccaatgatgatgaagaacgaacgatattggccagatgagccgctgtttcatcgggataattcattccggcaaaacgtcccaatgaccatccgtcggaactgatcggcaggaaatacttgaaatagtccagtgtatattccagtgcataccaggtggttactgctcccatggaaaaacctccgatggcccgatgattcctggaagcctgcagcccctctaagtccgtttgctgagtgtatgtacggtaacggctctctaccaatggaatcaggtcgttgaccagttcttgaggaagagccttgcaataggggtcagcatcaggatagtaatcgacaggagtgccatatacataacttgtggataccacgataaccggagacatgtctcccttttcgatcaggtggtcaagcaagttccgcatcatgccgttctcgttctgaaagaaggaggcagctgtttctccatgcccatgtacgaaatagaacacatcatagcattcatcggatgattccttatacccatacggcaggtagacataggccgtatttgagcgcatttcaccgttcccatccacatagttgcgggtgtcatagtcaatttgcaccacgcttccttgggaagcggtttcccccagatattcggctggaacaggtacgatcttgttcaagagtgagggatagccggaggaagtctcagcttcggttacctcctcgttgccattgcaagctgtcagacacagacaaagcaagaaggttttaatagtcatagaaaatgtacacatagtaaattgtttataagttgcttaaatattattctttgattgtatattataccacgtttgctggatcattatactaacgtatcgtgtaggtaagactgagcatcatatatggttccagcacattgcttgatatataatcacagtagttgctttccagccgatgtgtaaaatttcggttctgtttgagtacatcaaaagcctccagtttgatttctgcagcattgtttttcaggaatttcttacctaaagacagattccatagacaataatcttccgtacccgtatccagacctgtgtaacctacatagttaaacgtactgcgcaaagtaagcccccaaaagaacatacaacccagtttgacagaagcggtatgagtgatgtaatcgttgcttgtcgcttcatcagatgaactgaatatattgttgatggcagcagagtaagaggttgtaaaatctatattcttattgatattgcttccgataattattttaggtattaagttcagttcacgtgtatcgcttgtcaccccattaaagacagtgggggtattggtgtaattggcagctacgctgacattgatattgctgcggatcaaatcaagcggaaatccgtaagttaacatggattgcagtgaatagtagccattcaagtttatcggtcgggtaaactgtgcccccttgttgagtgtaacagaaggcatcaactctatattctcattggctacaaacgtgctgtctccaatgtacttctgcttataggtggctcccagcatggcgataaaagtatgtccggactttgtcgtatgtatatagcgaagattggctatatgcgataattcctgatccagataagggttcccggcaaatagaaacaggggatttgaattgttgaccacagattgcaaatccgttatggacggcgaagacgtgatgctacggtaacggaactgcaacgaattggtttggtctaagacatagtggaacatcagtgagggaaggactgaaaagtaactgcgggagtgatgttcggattgaggataggttaaatctcccttcaagtttgcccattgggtttccagtctcaacatggcattccatctgtcgctctgataacgaatacctacattcccggattgggtcagataatccgaccgatatatgctggaaagattttcatccagttgctcgtaggattcctcgtccggtcgtgacacaaaagtcttttgtccgttctccgaatcagaataattgagcttatatcccaattgcaactgaagctcatcggatattttttccgtaaaagtcaggttggaacggaaactgtattgttttttgatgttattcttcaattggctatgttcttcaggaatgttctgttccaaagaactgtacaataagtctgtaaaatctgaacggttactgccatccgtattgctcatgcgtccgctcagcatccatgataatgttcgtcccggttttgtgaaacgatgacggaacagcagatccgcaccaatattataggctttgttttctccaactgccgtggtacttgtttcattgctcaaggccccgtcggttttgtttgtcccttgcaatgaattgttgctgtccatattttgaaagctcaaagatgggcgaaaaagcaacgaactccgttcgtttatctggtaatccagcttgaaattgaaccgatgattccagttggtcaggtaattctctttatattcttcataagacattccagccaatgctgcatccaaataattacggtttgtttgttgaagagtctgattgtctgatttattgaaaaaatagctcgaagttatttttaactttttcccccattggtctacataattcagtcccagcccattggtggatgtaagtccgtccatactgccaatcatgaagtctgctacggaacttccactttggtaacctttttccccgcctccattccggaatccttttcttttgtttccagaatttgaagataggattcctgtcaaatcttcttgtgaaaaattctgctgatttacattgttggacatgcctaatactgatatacgttgattttcattaaagaaattcagattcccatttaccttataacgttcatcagtaccatattccgcagtcatctctccaaaagttccttgtcggaatcccgttttcgtgacgatatttatagttttaacttcttcgccatcgtcaaatccggtgaactcagactggtcacttttcttgtcaaaaatttcgatactggcaataatgtccgaaggcaggttcttgacagccagactgacatccccttcaaagaattccttgccatccactaaaatcttttccacttgctctccctgagcctgaacagtaccgccctcgacaacaacaccgggcatctttgccagcaaatcctcagccgagcttccctgcattaccttgaacgcctccgcattatacatgagactgtcaccacgttgttcggctcgggtagcacgtcccgtaactgcaacttctcccagcaactgtgagttttcctgcatatatacattgattttgttggaagtatttgctattttaacagtttccataaaagctttatagcctacataagaaatattcaggacataagtacctgatttaagcttattgaaatagaattgcccgctcaaatcggtagttgtaaataaggcactcccattttccggaaccaatttgactgttgcagaaattaagacctcatccgaagccttgtcttttacgacaccacttaggctttgagccgaaacggacagtgacaggcatagacatgccacaagcaaaagtattcttaccataaaaacagctttgattaaaagaagaaattgatcattcacctccaaaggaagccagaatcttattttttcaataaaagcggctaccgatgactcttttatcgcaaagaacattgggggattatatataccggctattcgcttgagcgtatatgattgaaaatccaattgagacgtttgtccgtatagctctctgtgcaagtcttaatatgtgaccagccattttccacgtcaagtatagtttccctattcagctcctttaaccgttccataaaagaagtgactggagcaatgttcattaggttatcgccagtccccatcaccgtgtagaccggagtattggcgagcagagcagcatctaccgtgtccggatttccggctaccggcataacggcggcaaacaagtaaggataggcagatgccattttccaaacccctgttcctcccatagaaccgcccattagatagatacggtctggatccacttttcccttgttcatgtattcatcaacaagattttttataatctcatttgtctggactccccacgtaagggagtccggacattgaggtacaatcataaaggcattaatacggtttctgcaaaggtaatcggcaatcgtatagattgcatcttcattcatttgtctgacattatcacttccacgctttagtccgccatgcaaatagattaccaatatcggtttctgttgtgtgccaccggctgttatcaccgtttccctgtaaggaagtgtgatgttattatatgaccatacattgaaactgaagtctgaatctgtatatctgcatggtgtagctgatgcccaaatgctcatgtacaaaagaatagttatgattatcatgcgctgccgctgtattcgcagtaaatcattctttcgactgaccacgctttcctttcttcatgtcagcgattgactgttctatcatctgcttgtagaccgtttgctgttcggctgtcagcagaaggcagatgtccgccgtcagtttttcgagggcttccctgcgcttttcacggggatatttctgcttgttgaaatccgcatacaattcacggattttcgttttctgctcatcgctcagggtcagcttttcatccatttccttgatgcgctgttcagtccgctgttgcgcagtgagcttggttttactttcttgtgctggtacctgcaaggtggtagcgatggcaatggccatcattaaaaacattcttttcatactaaatttctattatgagttgataaaaagtagataataatctctgtctatttggattggggagtatctgttttgacaacccggaaccccacattggcatagcctttgtttccggatcgcacatcgtccgatttctcgctgcggcagtcgtcacgtttggcatcccaactgcccccttttacaagatactgtccgtcgacgtccgttgaagtggtccactcccagcagttgccccaaaagtcaatccctccgcaggcaccggtagattgcttgtaggcatctacggcagtcagccccgactccacatgattggcattcatggctacatctttaggcatgtgtccggcacccaagatccattcttcttcactgggcaatcgatagatatgcttgctatcctgagccgtcagccattggcagtaggcttgggcatcctggagggaaatgttcactaccggataattgtcctgccctgatttgtaagtgaaacagggtttaaaggcagcatactcggcattggtgacgggagcatacccgatataagccgttgtatcagaagccccacgcaacaccatccacgcatccttcggattatcgtcccttcgggggtcgatgaaacggaggaactgttgctggattcgtgtttcacggttctccaccatctcatcaacgataccctgcatgtgttccacaatactgtaagtacgggcttcgcgttccagttcgcgcagcttgttcttctttctggccactactttgtcgtagcgtacccccatctggtcgagtaacgcctgtctgttggcttccgtcggattcttccggtataggacaaagagcttatgtgtcttggaatccattttaggccgccctttttccaccagcggtgcaccgggcttgtcaaactccagttcactttccaccaaatcatcaggactgatgaactcacccaactctactttctgatgtactccgaaatagtgtgccaccagaccgtccttgtaaatggagaacctgtatcctccatacagattgcaggggagggtggaaatgtagtagtcctttccggggatgaacccggacttctcactggagatgtaggtaatgatggtgctggtatgcgccatatcaccgactacggttttcccaaaagcatcctgacgggtgattgccgtaccagccagcggaagaccgtccacactttccacttctatcttcaccacacctgccatcggaaggttaaatcggatgccacaacgctgttcggcactcccttcatacccgtcttcctggtcggtttgatgaatcgatactgttatttttgagtcgctgtcatccttctgtgcggacacagcagtggccgtcacaatggcaacagccattgctaaaaatatttttttcatcatgtaatgtgattagataattagatgagatctgttcttacgactctgaaaccgacgttggcatagccttggcctccggaacgaacgacgtctgatttttcgctgcggcaatcatcgcgttccgaatcccagctgccgcctttgatgatatactgcccctcagcatccgttgaaatagtccattcccagcaattgccccagaagtcaatacctccgcaagcaccggttgtctggctataagcatctaccgctgtcagacccgtctccacatgacccgcattcatcaaaacatctttgggcatgtgtccggcacctaagatccattcttcatcggtcggcagacggtagctgtgcgtcgggtcattctgcgccagccaatcgcaataggctgtggcttcctctacggtgacattcaccaccggataattatcctgtccgtcttcatatgtaaagtctgacttgaatgctgcatattccgcattggtaacgggagcataaccgatgtaggcattgggagcggaagcccctctcagcaccatccacgcatcattcggattttcatcatttcgggggtcaataagacgcaggaactgctgttcgagccggatgtcacggttatctaccatctcgtccacaatctcctgcatttcttccaccacatccaaggtgagggcttctctttccaattcgcggagcttcgcttttttacgggctaccactttatcataacgaacacccatttgatccagcaaagcctgcttgttttcctctgtagggttctgctgatattgacggagaagtgccgtagtcgtagcatccagttccggtcgttcttcttctacaagcggcgcatccgggtcgtcaaactccaattcactttcaatcaggtcagcgggtgtgatgaatgagcccatttccaccgtttgatgcacaccgaaataatgtgccacgaggccttcccgatagatagacaggcgataacctccataaaggttgcaaggcaaggtaaaaatggagtagtcttttccgggagtcaatccgttttcatccggggcattgaacaccaggatggagttgacgttttccacttccccggtcaacgcttcccctgaatctccccattgaatgcctgttgttccggccaaggcatagccgtctacactttccaactctattctagtgattccagacagcgagaaattcagtttcaagccactgtaaatattacttacatcctgcgaacttggtagattcaacgcagtaaccccattttcatcatatccgtcgcttccagccacttgttcggcaagaactgtcaaggttggatttccgctgccggatacttctcccggttggtctgtaatctcatcactgtcacaagaagacatagctgtcgtcatgaagaacgacaaacaaaatatgccaaaagcttttaatttcataattttcattgtttatttacgtttatctttattctgagaacgttgaaacagccggttcatcattcttctttccaatacatatactttttctatttgcgtgggagtcagaaatttgctatactttaaataatactttttacgtaggtcaagtatcttttgactatgggcaaacctttcgttcatggcctgttctgcctctttatccgaaagatgagacttctctcttttcggccggggacccaatgcccagatttctttttggaactggcagaaagtttccacaaactgccgggacgttttgttatccatcgccatttcattagctataaactgagcctgtgtctcggccagttgttcacgggtcatacgctgctgctcgctcttttgggcatacgtatttacatggaacacaatcatgaccaaggcaagtacaactactttagtgatattcttcatttcctttgttattattcgttcataaacagatcatactgataagtcgcaaacaggtaatcctgatcgctgctgctcagattggcaaaagccttttccacatcttcaaaactattacttgaatcatggggtaataagttgaagacaaccaataatgcaatacttgccgccacaagtcctcccgtcacagaataccaaaggcgaaagttgcgtttgggcttggaaggaagcatctccaattttacagtttcccatacattgttttccatatcatccaagaaaccgtccggcgcagtataaggcagccgtttacctacgcggtcgaaatcaaaatcttctttcatacatctaattgttagcattcatgtatttgacaatcttatctttggcaatatgatagctggactttacaccatcagttgttgaaccgataattccggcaatctcatcatatcccaaatcattatagtatcgtaagttaaaagccagctgttgcttggtaggcaaggataaaatggctttttgcaactttacagcttccaaatcattgtaatcgacaaattcatcagccatcagattgcttagctcactcgaagaatcatccaatgacacccgttcctcttttttataccgatccaacaggcgcaaagcttcgttggtggcaatacggtatacccaggaacgtaaagtgcattcgcctttaaaatcggataatgacctgaatacccttataaaagtttcttgcgttgcatcctgtgcatcttcatgggttacaaccaaccttcggatatgccagtaaaccgcttccttatattttgtcatcagatagcggaaacctttctccggttccttagccgttagctccaccagttccttgtcatcctttatgctcataaacagtcggggattcacttgccatatagatggaaggtgtatttaacttagtcatatccgtaatctgtgagttaatgaccatacaatgcctgtggtgatggggatgacgagacttgcgtacagtcacacaggattgcagcaaaaacaagactgtcactcccagcatcagtagtttccaaatctttttcatatcctattatcttttggtatatattttctttttccctctaattacgagttgtatgggatttttcttatccatggcaaaagcatccagttcagcttctgccgcagctctactgagttgcgtcatcttggcatattgtttaatcgtcagatatttgttcgttttcaagtaagccatagccattgccaatctttcctttcgattgaatcggttgctgatataatggagcatgtccggtttaaccacaacggtaacaatccgattagaaggatagtaacaatagtgacgccaatgttgggcgtttacagctccgcaaatcaacaacatcaccaaaattagcattcctaccttttcttttatagttgtatacatagttactattttttattagacaattttatcttacataccttttcatgagctcatttaaatggacgttctgtataaaagaccttgcagacgaattaaagtaaaattggattagcattttttttcttgtttttttaatttcataaaagaaacaagaaaaaataatataaaaaatggactttttgtctgaaagataaagtcccacgaataagcttgcgattgtttttgtatatttctatattttgttgggattcataaaagaaaaggtggcgtttttggataatttgggcgctattatcaaccatttacgtagggatgatcggtttatcgacatttagtttgctgaagataaatgtatatcaggtcgtatactacattattttctcatcagtatttaagatagaaaaaatgttttcataaaaaattaggcaacttcggagcctgattaacagagggtttagcggcatacctgccgttaaaccgtcctgttttcgtttaacgaaaacacaacttgctgtccgcaggagcggacctcgtttctccaataattattgtgtatcagaccattgtgtggctattttcctgtggtttgtggggcttttccatcagatatttgccggctgttctccccattaaaggatagatatatctccatgaccatgtgacttacgcccataattcggggataaggaggcgaatatacggaaaatctgccctttacatgccctattgtccattaatggattgctacttctacacttctgcaaatggagaatgacgtgtaaccgtatacgccttattgttttttcatcgtctccattaacggattgctacttctacacttctgcaaatggagaataacaggtagccgtatacgccttattgtttttcttcatcgtctccattaacggattgctacttctacacttctgcaaatggagaataacaagtagccgtatacgccttattgttttttcatcgtctccattaatggattgaaacttctacacatctgtaaatggagaataacaagtagccgtatacgccttattgttttttcatcgtctccattaatggattgaaacttctacacatctgtaaatggagaataacaggtagccgtatacgccttattgtttttcttcatcgtctccattaatggattgatatttatacacttctgcaaatggagattttgagatatctatatccggaaggatgcgtgctcccttcgctcccggctatccctattttgatatccggctatatcgcaattctgtgatagcattatccggatagcgtatcatacggctatatacaaatatggctacactataattcatggttgtgatggagatggcttttcctatccggtaacagaccatgatgccacgaggaaaaaagcgacagccgcagagaaaaaacggatggcaggaaccattatggaatctggtaaatagaaaatccggtacatgcgaattcaggcgatcatcccggatggtaacctgtcaaagaggcttttgagacatttgaaataccgataataaaaaaaacgagatcaggtattttggcggatggcggcaggattgccgcctccggcccttccgagtttgtacgcgtcctgcgtgagcgcagctggtttgacagcgggtgcaccgacggggagtacatggtgaatttctccgggcggtacaggaaactgcacggggtgacggtgaggaccgacacgccggagcatttcatggacgacctgaaaaagtacggttacatcaagggctgaacagtccgttcctttattattacactccctgccggtttggggtcgcttcacttccggtggggatttttcttttttcatcgccgtgacgcacccgtccttcaggttttccaaagggggtcgtgaaaaccgaccggctacggagtatttttccttcccatatgacaaaaaccgactatccatgactattcctgccagtgtaccggtcgcgcttgcctctcatggtttcttcccttatattcgcactgacatttaaacaagttgaaaaatatggaaatatgctacatcgaggccggtgtccttgagaggatgctggcacgcgccgagaacctgtccgcacatgtggacagactgtatgagagaaaccgctgtaaggaacccggagagtgactggacggccaggatgtctgcctgcgccttgacatctcgccacgtaccctgcagacactccgcgataccggacggctggcgttcacccgcctccagcgcaagttctattacaagccagaggatgtggagaagctgatcgcctacgtcggcatcagacgcaaggagaaggcaatgagagaaggaaggaagaacggaaacctttaaagagcggaagagatggaaggcattatcgacaaggagaacgaacgtgtccgcaggttctttgccctgctggacaacatggagaaaaaagtggagcgtcttgcccgtgacaaccgtcctcccttcaacggggaacggttcctgactgacagggagctttccggaacgttgaggatcagccgcaggtgcctacaggattacagggaccaagggcggattccctatatccagcttggcgggaagatcctgtacaggcagtcggacatcgagaagctgttggaggagaactatcacgcagcattggtataatatcgtattcaagcttaaggattgccgccggaattgtaaatacaattccggcggcaatttttttatttagcctgcggcttccttgtcggccgcaggctttcttctttccatcagccggtccatgtccgaggatatcttccggtcggtgacctgggcgtagacctgcgtgctgtcgatattcgtatggcccattatcctggcgatgctctctatcggaatgcccgcggtcagtgtcagggtcccgaacgaatgccgggccatgtggtaggacaggttctctttcatgcctaatgccacgcccattccatgtacctcgtaccagaggacatcgcggaccggcagcgggaataccggcctgtcgtcatccgtggtgttgtaaagatccagtatctgtccggctatgggatgcagcgggatgaacgcctccacgtccgttttggcgcggcggatgcggatataccttcttccttccgaggtcgttccgatgtgacggggatggagagccctcgtatccgcgtaggccagaccggtcagcgaggagaagatgaacgtcctgcgcgccagctccatcatcgggtcgggcagcggggtttccatcatccgcttcagttcactgcggctgatatgccttagtttaggtgcttctttcctctcgtatgccacgtcctctatcgggttggcacgcaatacttcccggtccacggcgatgtagatgagccggttgagccagcacaggcagtggttcacgtgtccgttcctgtgtcccagctccttcttgagaaagaccttgaacgattcggcgaactcttcggtgatgtccgaaaaggcgatgtccttcatcccgcgggattcgatgaactgcctgaggttaagctgcgtggtcttcgactggcggtaggtggaattgatctccttggagcggaccctgagccgttcgcgttccacctctccggcctgcaggaggtattccggcacggaattggcaccggatacggtggtcttgagcagctcggccgtgaccactccctggttcctcagcaggttcccgtacgcctcttccagccggcttcggaaggcggcaaggcggttgttctccctggctgttttgatttcacacttcttgctgtcccagtctccgggtttgcaatagatgcctgtcgtgacagccgatttctttccgtcgatgctgatccggcagaggacggcggtcgtgccgtccgattttaccttgttacggttgatgtagaataaaagcttgaatgtactgcgcatgataatgattgtttaaggattaaagaataagtttcaaatcgcgggttgcctcgacgaacctgtccatgtcctcgaacagtcgcttcggggttacacgcgcgtatatctgggtggtctttatgttggagtgtcccagcatcttgctgatggtctcgatcggcaccccttcctcgagcgtgaccaatgaggcgaaagaatgccttcccatgtggtagacaaggtcctggctcagccccgccatcaggcgcagggatttcatgtttgccctgagcgtgtggtagtcctgcggcgggaagagggtagtgcgggtatcgtcacggtacttctcgatcaacgcgagtgcttccggcagcagcttgacgcgtccgaggtagtcagtcttctttcgccggtatttcagccagaggctgccctcgtcatcccggaagaggttctcccgggtgatgcttaccgcatcagcataggcggtgccggtgtaacaggcgaaaaggaagaggtcccgggtgatgacatgtgacctgcgtttttccggtatctccagatcacgcagcttctcgaaattctcacggctgagtgctttcggtgttgtctccttctgcttgggcagcttgaagtggcagaaatggtatttctccgagtgcccctccttgtaggcgatgtggcagatctttttcaggatggacaggtaatggcgcaccgtctccatcgccagtctcttcttttccaggcagaaatcctgatagtcacggatgaactgctcgttgagctgtccgaaggcgaggtccgagaccttgaattccgttttgatgaattcggcaagagtgcgccgggtgtacacgtaggtcgacattgtcgtcggcgcacggtccacgccgacacgggtcttcatctcctcgttgtgccggtcgagaagtttgagcagggtcatctgcatgcccgcgttactctggaacatgtccctgaccgcggcggcatcgaaatcctttttcctttccatgagggaattgaaggccgagtgtacggcaagcagcagcctctctatcttttcattggtctccaccgcttcccggctcttgccattcaatcggctctcacgcgcgttccatagcccgggggtacaggaaagcttgcagctgaactgcaccatcgtgcggttgagggtgatccgtcccatgatcggggccttgccggtcttgtccggctcgctctttttcaggtagagcagcaccttgaatttttccactttcataacgctcttttttaggttgtaaaaatactcctttgaaaagcgtcctttggcatgcaaaacattgataaacagtgaatacaaatccgctttgttcctatcagtaaaaattcggttacctgccgttgtttccgaaacaggcggctaacagtctggtaactgaaacgtcgcaatattttgttgtcttttgcaggtatgtctgttctgcaattcttgcaaaatgcttaattataaacgttttacgtttaattatcgtcattctgttttttattgcatttctaaatattacttacactgcccggcacacgttcgccacgaccaccacgctgtcaaagggcgtacccattgaaacggtgtccaagatgctgggacacacaaacatagaaactacgcaaatttacgcccgcatcaccaacagcaagataggcagcgatatgcaggggcttgacaagaagtttgtcggcatcgagaagatttacaaggaagtcgccatgtaatcttgattattgggaactggtcacaatttgtgaccagtccttgctattattccaacattgctaaatctcctaaaatatacgattatggatttgcagattatccaaaacaagatttttgaggtcagaggttgccgggtgatgctcgattatcatttggcagaactctaccaagtggaaacacgagccttgaagcaggcggtcaagcgcaatatcgagcgttttccaagtgattttatgtttgttctcacccaagaggaagctaacttgctgttatccataggggtatcacaaaatgtgataccccctgcttacaacttcggcgttgctatgcctatggctttcaccgagcagggcgtagccatgctttcttcggttctccgctccaaggtagccatagaagtaaacatttcaatcatgcgggctttcgttctcatgcgccaaatggcaatcggttacgaggaactgtcaaggcgcatcgaggaactggaggtaagcaccgatgcgcagttcaacgaactgtaccaagcccttacccagcttttgagccagtcgaaacaacagaaagaacgccgtccggtaggtttcgttacctataaccgtgacaaaaacgaataggtaacgatttcggtaacgaaattcctcctaataaactatatcccaatgaagtacattcttccaccttgcgggcagtccaccgactacccgcattttttatatccttttccaactggcacattccccgaaacgccagccgtgcgtggcatggctgactgtattccgtgaaaagagccgttggaaacccgcacaagcgtattgcaagcaagctcacaacacccttgcctttcccgcccgcatggagtgttccctaaaagataaaagagaacaggcacttttccccggtttccctatctgtaaatcttcctcttacgcagtcccccagccgggacagtcgttttaatcatttcaataggcaaaggtagttacgtgttcttcacgattttgcaaggtcgagccgttccggtttggcgaaaaaatcttccctgccttgcgaggtattttttgcccaaaaccttgcaaactctaaacactacccttttgagcctatgtgaaacgaaaacgaccgacccgaccggaagacgcataaaaaaaaagtcggatttacgggaaacaggaaaaaagttcagtgaaacttcaactccctcacctctcaaatccgcataaaattaaaaacttaaaaaattacagcaatatggaagcaaaggtattatcggaagcaaaagtttatgtaggcacttatgccaagtacaacaacggttcattgtccggcgcatggctcgacctttcggactattcggacaaggaagaattttatgaagcctgccgggaacttcacaaggacgaggaagatgcggaatacatgtttcaggactgggagaacgtgccggagggcttaatcggcgaaagctggatttctgaaaactttttcgctttgcgtgatgcggtggaggatttgagcgacaccgagcaggaagcctttttcgtgtggtgcaactataaaagccatgatttgggcgaggaagatgcggacgaccttgtacgtgatttccgggatgaatatcaaggggaatatgacgatgaagaagatttcgcctatgaaattatagaagaatgttacgacctgccggagttcacaaagacctatttcgattatgaaaagtttgcccgtgacctttttatgtgcgattactggtttgatgacggctttgtgttccgtgcggcataatcaaataccaatccgggcggggtgtcaaagccctgctcgctaaaaacaaccaagcgatgaaacggaaaagcatttataaaatcctttggcgggcgttcctgctctgccttgcatggcggttcaccagcgtagccggagcaggcacggcgataacggcgtatattgtatttcgtgccgcctgtttcctactccgtgtctgcctgtccgccttttatgcgctggctgtggctctgcttttcctttcgcttctttcgatagtttaatgaaaatagttttccacattggctaaaacacttacagagcgtcgtaaataacgggacggatgggtgaaaactcagaaataaaaaggaaatccagtcggactactttctttcatgaacattaacgggaaagaaagtagcaaagaaacctaatgctaatcttgtggaaaaataacttctttgaattgttttttatatgtatctataaatttcaccatgtttgccctcttatatgtaccatccataaaatcagggtatgaaataaatcgctcgaaaatattatcaatactcataccatgatacatgattctctctttgctttttatgtacttatggtacttatcaatagtacttttaaaatccaacgctccattcgctatttttggtgcgaattttatcaaagtattgatgtccataattgttaaatcattcactttgtgcttattaccttttactctacttttaaattctctattaagaagagtattcaatccgtgtaagttaaatagtccatcaaaaactattagtatgggataaatatgaattcttttatgttttatgtttttatcatacttaaaatttccacttaatattttatctacatttacagctaattgagatacacctaatttgctttttttcttattcttctgttcgacttctataaattttttaaacagagctttttctattatatcataattgcgagccatacggtctttggcggcaattctaacatctttgtgttcaaatatgaaaatcgtatttttaattcttatgtaataatcaggttctccgtcaaaatcgggacatagttgtttcaattgatttccatttaacttaacagccttgtgcatagatttaaatgcgttttccataaatttgtagaataggtattcctcggaaaataatttatcaaagttgccaaagaactgttgtgcagacaatttacttactcctattaaatcaaatattaaacctgtgtacatacgttgtaatataaatttcatatcagacaataggtacatatctggtttaatttcaatcaatggaatctgtctaaattttttataatcaagattttggtctaatgaaacaatatcgttaatctgaattttattgaaaggttggtaatcattaacaagcgtaggacatgaataagctcctgattttttaaaggcgaaatatatcgctaaatatttgaaaccataatgttgagctgatttgatgttttcttgttgcatatattgagacaagtaatcattaaattgattattagtttcacagaaacggcaaaattcgagcagtttaataatttccatcagtcctaaatcgttatctcgaagtccagtcaatgaatagaaagagaagttatttgttaataacatcctttctattctcacattctctgtggttatgtcagattctcttaaatcctcgatgtcaaatatttcatcatttaccaacaagatggctttaataaacctggcatgataatctaaatctgacatattattattagttggagaaaccgacaattcccgtcttagcaattccaacattgaaacctcgcataataatatattcctatcactttctatgctgggatgatatggcttttgttgtttatgatattcagataattttttatttatttctttctcaaaactccaacaaccatattgtttaatgttattcagaatttctctaatgtctttatttaaataagtatttctatacaatagaaacaatctaaaaaaaatgtctcttggaatatcagataaaatatttattacatccaatgtttcttgtggatacaaatctttattggaaatatgaacttggaatttgtaaatcatttcttttttccgcaaagttaagcacaaagaaacacccaacaatattttattgagtgtttcttaacacattcatataaaaaggtttattcctcttctttgttgctattgttattgaacgaaaacgaaagttgttgcacctgtccgaagctgtcgatgatataaatgtctatcgtctgctggtctgtcgatgccgaggtgtagtagagcctgaacgtttctttctccagcgggtacaggtcattgggcaggaacaccgtgccgttatccatttccagcttccctttgccgtccggctggaagtacctgatttgataggtagtcggctggtaatagccgccacgcaccagtcggcagcgtatttcggcggtttccccgactttcaaccttttgggtactggcagcgtttcgatgctgaacgggtatgcctgctgaatatccaagttgtcattacaggcggtgacaagcacaagggcggccacgatgtagcagcccatgatgactttatacattacattcttcatatacattattatatagcggtcagttgataatgaatttcagtcccacagatacctgcgtgtggaacttgccgatgtccgagccgaacaacgcccgttcccttgcgctgacaagcaaggctatctgatcggtcaggtaggcttccagcgtcagcgaaccactgtaaatgaagcaatctttattcagcagtgtagaactgtctagcaagaactttttccaagagtgccatttgctcgtcagccataggcatggcgttttgctgttgctgtagtcggtcaattttaacaaggagaatatatgaaatataatctaataaaatattcgtttgtcttttgtctataatctgattaatactattttagtggcataattattaaaaataggaattatggcattttcagaagaattaaaattaaaggttaatgaatatattaataagcaccatcctaatgaagaatggtggcggcagtattttgatacaccttttgttgctgatacagatttggcgaatcgcttggtacaagagatgatggctataagatctatatatcagttattagaaggactgagagttgagaacgagctcttaagagctcaagctaaaattcaaattatcacttatgcatctgtttatgaggccgttttacattgtgtgatttttcaaacaggtttaaaggatacttctcatgtaaaaaatctattgactcaagataaatatgtaaaacgtagtttgccggaaccttataaaaacatagttcattgtgaagaaaacatttatacaatggctaaagtggaaggaagaagggatgaaagatatataaaatttgaagaaatattgtctgttgcgaaaaccttagaactcatagatgactccttgcataataatcttcttgaattatataatttgagaaatgcgattcacttacaagctgagataaagaaaggagtagtttatgaacttgaaatttcacaaaaggctcataaattgttaaaaccgttcaaaaggcaaattatagaaggattaaaacggcacaaaatagttgaccgaagatataatgtgaggttttcacgaaaagaaatcatatccatctgaaaataaatagaatttataaattataataagtggatgtgtgaaacttagaatacacatccactttgtttttaaaatcacaatcttatccaagcaccggcggcctctcgtcgtcctccttcctcctgccgccgttggtctgccgtgtcttcagcaccgtcttctggcggtcgatgagcacgttcacgcggtcgatgaaggtggcgtaggccccgtccccgttcaccacggcaagggcgttcaccaatcctgtcagcgagcggtaggcggcgtccgctgcctggcggctctccttcacgatgcccacctggcgggcggcttcctcttccgtgcgttgcgagacggcggcgaggaaggcggtttcgcacgattccaggttcgtgagccatgcttcgaagaagatgcttgccagtttgccgttgccgatggctttcaggtcttgcaggaggttgtgcaggatgccgctttcctccgtctgggggagggcggtcgggtcgccgtatttgtcgaagagcgtcttgaactccgtggcggcgcggcgaagggattccgtggggtgggcggtcatggccttgaggtagttgttggccgcgcgccaggcattgtcgcgggcggcgtcagcttcggcggcgagggcggtggagggaacggtggcggagtctttcagggcgtcgtcgaaggtgtcgaccgcattcttgaaggtggcgatggaggcggccagtgtggacgggacggcggtggcggacatgctcagttcttcggggcggttttcttcggcgggtgacaggttggcggtctcggaggcgatgagtttcaggaatccgaagtcttcttccacccggaggcgggcgatgttgaacgatgcaatttgtttcatatagttttggtttttaatcgtatgcaacaatgcgctgcatggacaaatgtaggatttttcttccgaacagggcaagaatatggaggaaaatgggttggcagggggaaaataagcggaaaagcggtggaaacggcagtctttggcacttatggggaagaaaacgaattgaaaacccggtagccggggcttcttcgggaaaagaagtgccggataccgggtttttgatgcttgcggaagaagaaaagcgctgccgaccgcaatcgccggtgctttttccttgtccggagggggttatccgaggggattttcttcgaagtcgccgtcgcttccgcttccgctgcccggggtgctgtcttcggcagccgcggggagttcgatccattccagcggttcggcatctaccagcgcgcgggtgtaggcgccgccgccggtgcgggtgcgttcggggatgaattgcacgcggacggcttgcacttgtttctcgaaactaaagtctttaatgtccttcacccccttcgtgtcgagcacgtagcggaagtagcccagccctttgatgtggacgctcttgccttgcgacatgcgggtgtgcatcacgccggagatgtcgcccagcacggcttgcacgtccgagttgctcacggtggagattttcgagaggtctctggcgatggtttcggtttcgacgggttttccttgtacgacggcttgggggtaatggacgcccgtccgtttgctgaatgcttttttccaaaatggcataggcttgttgtgtttttgatggtttgtaacttgttgtttgtgcgcccttccacaaggtagctacctcggcaccggctcggtagctatctcgagggggacttggtagctaccttgtggggggcggggtaaatgtagggaggttttgcggatatgcaaccggtggcggcggggtatttatcgtatgcggggattatcgggaggtaatggcggggttgttgaaggaaacgggaatgtagtgttatttttttcgaccgtattttttcagaaagtcttgcaaccaaacacgatttgcacctcgtgaaaacctgccttcatgagcactgtctacttttgaatggcacaagacgcataaacattctaaattgttttcccgattgttgattttgttgccatcccgatggtgacaatgcatatatccataatcaaagacatcggtaatcttaattccacatcgttcgcaagtgtaattcttctttttacgatatgccaagcttatttcttgccattcttttgtatagcccaaaatatccacatccgtaactgtttcttgcggaatagcttttttgagttcttttacgaagtcattattgtctttataaatgtcgttttgctgacttctcaaaatttcagcacaatatttgcataaaggaagattgcctacggatttatcaagataatggtcatccatgtcccgtacttgcaagatttcctcatttgtccaacgatattcagcattaaaagaacctcttgctttaaattcctgaataatcctgcaattacaaagatggaaacgaggttttccatatcgagctaaatgatattctcttttatacatgaacccttgatgtttttgcccatctggagtcttgaagaaaatacctttatctgtaatctcaatcgtgccatctttgatatttttgatggatatatcaaccggtttaatcgggcgataagtttccgccttttctatttgataccctaactcttttaaggtggatttcaatttagggaatgtataaattggcttttctttttccatgatgctatttattgattctttttacaaaatcctctatcatcttttcgctggtggtaataatgcggaattccactcttctggatttttcatagtcaatcgccttgccggaatcgtaagtgagttgattttcgttatctaaagttcttccatacgaaagaccatttgccgtaaaccaatattccagcatcttctgttgttcggatgtatattttcggaacataggcatggaacgaaaatactgcaatacgcttaatgaacggcgttgtgaaagaattacgtttgcaatatacggatcagcggaaagtgcagggaaaggtgtagggtccgtgtgtccttcaatcctgatctcactgatattgttctttaatgaatcagtcagtaagatatcaaaatattgcggcaagaattcatccaatatatcgcagaatgcaggagtcaaatcccaagaacctgtttgaaaaagaacggtgggattggtgaaacgaagtgataaatctcgtccgattgtcatttcccatcgtgctgtgtcgctcttgaatttgtcaaccaatttatcgtgcagattctgacgcgcctcaatgtattcggctaaaacctctgtatgctcatcgaccttgctgatgtatgcgatagccacgaataaaaatataaccattaatccggtcattaaatcggatacggacaaccaaacattatgttttgccatgctttatcttcttttaatcattgcctgtatacaagtatctaattctgccagagtagcactcagtcttgaatagaattgtttatccaagtctgtcaattgagcattcaaactttcacttcccttttgaattattcctacacctgcttccaaatgctttttcgtatcagcccaaaattccttgttataatcacggattgaacttagttcttctagtttcttgattaataattgtactccatccacaaaattccgttgttttctaacccattcatttaattttgaggtagcatcatcaaatttaaccatgttttctttcgttaaattagctgtttcggacaatttagttgtgatggaagtaaatttggtatcttcaatcatgaccttttgcagttcagtgatcaatcttgaaagcattccacttgctccacttaattgtttggtatattcagctacattattgagaatagttgatgtttgttcaaactctttggtcatagtcgtatattggtgtgtcaggtctgaaatcatctttttattttcctgttgccatgtattgagtttttctacactttgattgagctgctcaaaattctcttttaccagtttgctgacaatcgaattcatttgacgttgaaattcttgagtagctgttttcataacttcgactaacgcttccgtattgcttttcttcagcaattctgcaaactcttcaaatttctgtgtcaatagcttattggtttctcccattttagtttcaatctcatcgacctcagcacgaagcacttcactcaatttctttgtatcatcttgtgtctcttgcaaaatagatgtcatggcggatgatatatccagttgctcacctaaacggttgtctatatgctctgcattatctttcaagatgtccaagaggacaatagtttgtgaactactgttttcaatagatgaaaggcgtacttcttgtgaacgtattaatagggtcatagcgtccatcttgtttgacatttcggttaaactggagttaatcgtgttgaacacattgaattgagcagacagcgtattataaaaagcggtttgattttgcgattgctgagttatggattgcagtaaggcctgcatagattgagtattttgcatattcatcgcttcgacagcattacaaatgcgagctgcggcttcatcctgattggttggtaatccagcctcgtaagtatcataaattttgtttatgataaaatttgtaatcatggatgaaatcatacccaataaggaggtgtaaaaagcggtttttaatccctccaataaaataggaatactctggtttaaatcagaagggttgaatccatacaatccggtcgtaattccccaaaaagtacccaatactcctaatgtggataataaaccgggaaattgatctatcgtacgcttgcattcctgcaatttatttttctgtttccaaaacaagataaaaatcagggcaataagccatgccaacaagattatgccaatacaaacggataatgtaatatacccagataaaaaatcaataaagcttcccatattcttattaattaacatctattcttaaatgaaaaacgtggaacccttgtactatcattcgtctttgaaggtcctaggaaaacctaaacatacaaataacagacaacagtcccacgcatatgcgtgagaaaccattgcgctattcttgtatgtttttgaaaatttcctaggttctcaaagacaagaacaaagcacagagcttcttaaattcacaatttcaatatcgagatatactcgaatttgttcgcaaaggtatgattaataatcgaatatctcaaagatgatataatttttcttcttgtaaatctattcgtgacggctttttatattcacatgaacatagcaagaggtcttttcgtccgctcattacacagcaatttttcggagaaaaaggcactggcttttctctataaattggaaaaggcgaccactgaattatctctattgaaccgtcaggttatcgacctgacaaacgagtgcaaggaactatggttgccaaaataagcacgggcggcaatatgttcggcgcactggcttacaaccaaaacaaggtggacagcgaagaagcaaaggtgcttttctccaaccggatgctgttgggcgaggacgggaatctctctatcggcgagtgtatgcgcagctttgaaatgcagatgcccgtccagctatccaccaagaagccgatacttcatatttccataaacccgcacccggaagacgtgctgaccgaccagcagctttccgacatcgcccaagagtatatgcggaaattgggctatggcgaccagccttatttggtgtacaagcataccgacatcgaccgccaccatattcacatcgtggggttgcgggtgggcgagaacggcaagccgctgaatgacaggttcgagcatcggcgcagcaagcaaatcacccgtgaactggaaaggaaatacaacctgcacccggcagagcgaaaggagcgtgccgaacgcccggaacttaaaaaggtggattatgccgccggggacgtgaagcaccaaatcggcaataccgtgaaagcggcttgttacggctaccgtttccagtcgttcggggaatacaaggctttgcttgccgcttacaacgtgtgcgccgaggaagtcaaaggtgaagtgaacggcaaatcctatcagggcattgtctattctgccacgaacgacaagggcgaaaagacaggcaacccggtaaaggcttcccgcatcggaaagtcggtaggctatgaagcggtgcagcgcagaatggagaaatcgggcgaagcaatcaaggacaggaaactgaaagagcgaacccggaagattgtcgccactgccatgcagaccgcccgcatccgcaaggaactggaacaacagctaagaaagcagggcattgacgtggtattccgtcagaacgacagcgggcgcatctatggcgttacgttcatcgaccatgacaaccgggtggtgctgaacggttcacgcttgggcaaggagtattcggcgaacgtgttcaacgaacgtttttcgggcgaaaccggaaagatgcaccagtccgaattgtcagcaccacagcaagaccagcccacgcatcaggaacagccgggcttcacgccgaaatccgatatcgttccgggtgtggcttcggtgctgggtgctttcggtggattgcttggcggcggtgcatcaggcggtgacgagccgcaggacaccgcccgccaaaagagaaagaagaaaaagaagcgcacaaggcgcatcgactaacttaaaaaacattacaatcatgcaacaggaagatgatttgagagggcttgcacgggtcatggactttatgcgggctgttagtattctattcgtgggaataaacgtgtactggttctgtcactccaccctgaaagaatggggagtgacctttgaagtgatagacaagatactgtggaacttccagcgcatcaccgggctgttctcgtccgtcctttggacgaaacttttttcggtggtgttcctcgccctgtcgtgcatcggcactaagggcgtgaaagaggaaaagataacgtggacgaagatacattgcagccttgcggctggtgtcgtgttgtttttcctgaactggtggatgctggaactgccgttgccacatacggcggatgccgtgttttatatcgttacgctatcggcgggctatatctgtatgctcatggcgggtacgtggatgtcccggttgttgaaaaacaacctaatggatgatgtctttaataccgagaacgaaagtttccagcaggaaacaaggcttatcgagaacgagtattcggtaaatctgcctacccggttctactataagaagaaatggaataatggctggataaatgtcgtgaacccgttccgtgccagtcttgtactgggaacgccgggcagcggtaagtcgtatgcagtggtaaacagttacataaaacagcaaatcgagaaaggttttgcgctttactgctatgattataagtttcccgatttatcggaaatcgcttacaatcacttgcttacacacttgggcggctacaaggtaaagcctaagttttacgttatcaactttgacgacccccgcaagagccaccgatgcaacccgataaacgccagcttcatgtcggacattgcggatgcctatgaagccagctacacgataatgcttaacctaaatcgcagctggataagcaagcagggcgatttcttcgtggaaagcccgattattcttttggcagctataatttggtatctccgtatctatcaaggcggtaagtattgcacgttcccgcacgccattgaactgttgaacaagaaatacgccgatgtgttcaccattttgcgcagttatcccgaactggaaaactacctttccccgttcgtggacgcatgggaaagttcggcagttgaacagttgcaggggcagatagccagtgcgaaaatcccgctttcaaggatgatttcacccgccctttactgggttatgacaggtgatgatttttcacttgacatcaacaacccgaaagagcctaaaatactggttgtcggcaacaatcctgaccgccaaaatatctactcggcggcactgggattatataacagccgtatcgtgaaactgataaataagaaaggtcagcttaaaagttcggtgataatagacgaattaccgactatatattttcgtgggcttgataatttgattgccaccgcccgaagcaataaggttgcggttctgctgggctttcaggattacagccagcttacccgtgattacggggacaaggaaagcaaagttatccaaaatacggtgggcaacgtgttcagcggtcaggtggtcggtgaaacggcgaaaatcctttccgagcgtttcggtaaggtgttgcagaaacggcagagcatgacaatcaaccaacgggagaaatccacctcgataagcacccaaatggacagcctgatacccgccagcaaaatatccaacctcacgcaaggtatgttcgtgggtgctgtggcggacaacttcgatgaacggatagagcagaagattttccactgcgaaatcgtggtggacaatgaaaaggtgaagcgggaaaccgcccgttacgtgaagttgccgcagattatcgacttcaccgacaaggacggcaacgaccggatgcaggaggagatacaagccaactatgaccgcatccgtcaggaagtccggcagattgtcgaggacgagataacccggattaagaacgacccggagctatgccatttgattaaggaggaagaataaataatgaaataggatagcggaatttttctgctatcttattttttgtgcattatccaatcttctatggcaatacgaaatcattgctaaaatttccaaagcatcttgttctgttatgttccagctaattttaggttcgtgagcttcaggatttctaaacattccacataatccttttaaaaggttacaaaatcctttatgctcgtctatttcagattttgactggaaattgtttataattaatataggtgtattactaaatacatactctattagcttgttcccgtcttcattatacaatgacaagtccctaattctatcaaataaacctttgtttgcttcaaagacagcatgaaaatagttgtttgttagcaactcagccttacaatatttaaagagagctaaatgtgcgttgcggttctctaattttgtttttaggttttctgctttttgctgcgcttctgaaatcgttttagcttgaattatttcactaaattttcctgttccatttagttgatagccgataaacgctaattgttgatttattgcatttcttttttctgcaaactcgtactcattatttacaaatttggcaggagataaagctaattgaataaaataaagtattttgttagaacactgatgtgtgttttggtaatttgcaaaagcactatataaccttttccatttggtattttgtgaatcaatatcttcaatttgagattgttgtaaaaggtattgtatttcacttcccgttaagccattacttgtatctcccaatattttggcgataccttctaacgtagcttgggtaaaacatcttcttttcacaatcgctataattatatactattccgataaatttcaaatttaaccagtatttcgtgtaggttcttcaacgcttccacagctttgcctatcggcggcatcttgcttttgtcaaaggtcagtttcttcaaatcggtggtgtacgccgtagccacttcgggcaacgccatgaccgcttcggcatccttgaatatcggtgcatcagccagcgacaagtgcgaacggaagtttttatttagtccgtcctctatcgtcactcggtacatggcatccaagaaatcttctgaatgtaggtaatcgttatattcctgattgtggtagagtgccgacaagtcgtaaacgtcacggatatgctttgccaacagtgcggttgcatcctcattgtaagacagctttaccagccttgaaaccttgtcgcagatagtctttcgggggttgatgcactgcatttcaaaactttccagcccgtaggtgtttatcagttcctcttgcccgatgctttcaagaaaagcggtcacaatcggtttgataacccgcttgtcggccgggtagaacatcagttttttatccggcaggtcacaggattttatctctatttccaaatgctctttaagtcccacgccttgaaatacattgtcatacgagaaatacagtttgcggtaattaccgcccgtttccgacaaatcttccttgtatatgtcactgttgagttcggctatgtatttggaaagtttcttgttcaatgtcttttccgcttgcttggacgcacctttgtcacccgtaaacacgaacaagtccaaatcttccgagaaacgttctatcagcccgtaggctttggaaagtgaagttccgcctttgaagtaggtcttatccgcatattcggacatggaaatatcccgcagtatcttcgatacccagtaatccttttccacgtgcgactgctcgtagccgaaatgttcagccgccagtgcgatgatttccttgaacgcttccttgtccgaatgtaaattcatatttctgtcctatgccgttttataatccaagttgaaccgtgtcgtgggaagaatggtctttgccatttccgtttgcagcacggtttgtctgatgtcgcccagtatgtctgccactacctttctgacacgtggcgggtaacttttcgccaaagatacgattttttccagttccggcaggctatacccgttgaaatattggctcttgacccggttgtagatgtcctgcccggttgttccgggtatgcgcttcatgtcctttatcgcatcgagcagccgcaagtacgggacaaggctttcattcgggtagtccatgcagtaggctttcacgcactctatatccaagttcttgaaacggaaacggcgaaccgggttaggagtggctatcgttatggttgtggcaacttgttcggtcagccccattttattatagacgtaagcccctgtgatatagccgttcagcttttcagtcaggtagcggaactgttcatcctgatagacaggcagctttcccaaccccagcactgatttcttgggacggtagtacgcccccttttcaacccgtaccagtatccctttgcggctctgttcggagagcagcaccgcaacattggcggtcttttccgtttcaaacgacaaatcccggaacgtgaatatacgcccggtatctatccgttcaatctgcccaagtatctcttttctgaatgaagccatatttatgtcctttgtttctatatgcaaagatagtatattatgtaattacctgcaaaaacataacaaagattttgccgaagatgttttctttttgtcgtgtcacctgataataggagaataagggaaacacaatcaaaggcttgtcaaatgcttcacaaatggttcgcaagcataatgcaagttttaataagtcgttgattataaggaataagaactataattaaatggctcatccaaagagagtgattaacttcgctctctttttttatgcccttttcaattctgcaaccaatggttgcggaatttcatcccacccggacaatttcagacaacgcaggacaaattcggacagtccttgccgcccgtccaaatatagcatatttagtcgctacctttgggcgggactattcccgtaaccactaaaattccaattatttatggtaaacagaatgaccccgcccgcagaggggcaggaaaaagacgtgctgctggtcttggataaacagcagggaaaggtgagtgccgttaagggtatcgacaaggagggcaatttgcagaccgtgccacccactaccggacacggcggcgagttcatgcaggtggacaagaacagcgatgtgttcagcaacttcatttccaacttctaccgcaagtatcaggacacttccgggctggaactgttcagcgtcaaggcttccgaagcggagcgggacgcaaaggcaatcgaggacaaccaccgcaaccctacaccggagggtgacaagcgggctgaaatgcttcgagttccgaagcccgacttccacgagttcaagcagggctaccgcttcaacccgtcaaaaatcgactgggagaacctgaaaaaagtcggcatcaccgccgacaccctgaaaaacacgagggacttcgaccgggtgatgcgtggctacaagtcccgcaacacctacaccgtttcggggacggtgggcggcttctacctcaaacctaccgatgtcaagctctctttctatcaggcaaaggacggcacggtagtacccaagctacacggcgtgcagcaggacgaaaaactgttgcaacgcccgttccatgaacacgagttcaccaagcaggaacagggcaacttgcaaggcactggcaacttgggcggcatcgctgaaatcaaagacccgaaaagcggcgagcaaatccccttgttcgtcagccgggacaggtacacgcacgaactggagtatatgcgggctgacaagtggaaatgccctgatacaatctgtaacgtgcaagtcagcctggaacagaaagctgcctttgaagccgggcaagcggtgaaaatggaaaacctgcaattcagggacggcacgaagcgcagtgcctatttgcaggtcagtgcggtggagcgtggcttggagttcctgcccgtgccgccgtccagttcttgcagcagtggcagcagcccgcagagcagcaggtcgccgggctaaaggacggcaagggcgttgagttcaacggtcatgtacagcccggcgcacagggcaaatcccccgacaaggtgcagccgaaagacgttacccccgccgccgagagccggacgcaggtagcggtcaattcggggggcaagaccaacgaagccaccaagcagggcaaagagccgttgaaacagggtcaggacaagcccaccgccaagcagaaagagaagcaggagaaagcgcaggacaagagcctgaaagctgacaagcccaagaagtccagaggaatgaaaatgtaatatccaccattaaaaagtaaagaattatgattgcattgatagcagagaagcccagcgtggcaaaggacatcgcccgcatcatcggtgcgaccgggcgtaatgacggttatctttccggcaacgggtatatggtgacatgggcgttcggccacttaatccagcttgccatgccggaagactacggcgtggcgaacttccgcagggagagcctgcccatactgccgcccgatttccagctaatcccccgtcaggtaaaagcggagaaaggctacaaggcagaccccggcgtgctgaaacagttgaaagtgataaaggaagtgttcgaccagtgcgaccggattattgtcgccaccgatgccgggcgtgagggtgagttaatcttccgctatatcttccattacctgaactgccggaaaccatttgtgcgcctgtggataagcagccttaccgacaaggcaatccgtgaggggctggataacttgcagccgggagagcgttacgataacctctacttctctgccaagtcccgcagcgaagcggactggctgatagggataaacgccacccaagcgttgagcgttgccgccgggcagggggtgttctcgctgggcagggtgcagacacccacgctcgtgatgatatgcggccgctatttggagaacaggaatttcgtacccgccaagttttggcaactcaaagcggcgactgccagcgggggaataaattttaccgcccaatcgaccgccaagtgggaacagcagcccgaagccatagccgccctgcaacgggtaaaggatgccgggcaacttgtggttaaatccgttgagaggaaagaagcctgccaagaaccgccgcttttgtacgaccttaccacgctgcaaaaggaagcgaacacgaagctgaacttctcggctgacaagacgctttccatagcgcaaagcctgtatgaaaagaaagtgatgtcctacccaagaaccggaagccgctatattccggaggacgttttcgatgaaatgccggaacgtgtcgccctgctggggcaatactcccgctttgccgggtatgccgccaggctggacggcacacccctgaaccgccgcagcgtgaatgacggcaaagtgaccgaccaccacgccttaatcattaccgagaacctgcccggcgaactttccaaagacgagcgggcggtttacgagctggtagccgggcgtatgctggaagccttttcgggcaagtgcgtgaaagacgttaccactgccttgctgtcagggggagataccgacttcacggtgaaagggtctgtgatgaaagaagccgggtggcgtgccgtgttcggcgagcaggaaacgggcggggatgaagaagccgccagcctgccgccactccaagagggagaatgtttgccactctccggcgtggatctgctcgaaaagcagaccaagccgaaaccgctgcacacggaaagcagcctgttgtcggcaatggagaacgcaggcagggaactggaagatgccgaactgaaagccagcctgaaagatgccgggataggcacgcccgccacccgtgcggcgattatcgaaacgctgttcgcccgccagtacatcgtgcgtgagaagaagaaccttgtacccaccgacaaggggcttgccgtttacaggattgtcagggacaagaagattgccgatgtcgaaatgacgggcatgtgggaaaccgcccttgccaagatagaagcgggcagcatggatgccgacacgttccggaagggcatcgaggtgtacgcaacgcaaatcacggcggaactgctatcggtgcagctatctgttgctactggtgaaacctgcccctgcccgaaatgcggcagcgggcgcatcctgttctacccgaaagtggcgaagtgttccaacgtggactgcacgcttaccatattccgcaacaagtgcgacaagcagctttccgacaagcagattgtcgagctggtgacgaaacgcaaaaccgggctaatcaaggacttcaagggcaagaacggcaaggctttcgatgcttcgctggtactggacgagcagttcaatgtcggtttttcattccccgaaaagaaagcgaaaccgaagaaatagcctatctttgccgctgaaatttcattgtgataggttttaagcttataataattgaaattttagtggttgcgcccggagggaaaccgggcgcattttttatatgttcccgccaaacaggtaggtcgaacagaccaccccgttatccagcaccctgctttccgagagtttccacagcgagccggatgtttccccgacaaaaccgatgcctttgcccgccatgaccgggacggtgtagattgtcaggctgtccagcagtccggctttaatcaatgaagtaagcagcttgccgccacccaccaccagcatgtcggtttcctgtttcagttcatagaccctttgcagcggttcttcggtcaggaactccaccccgcagtccggcgtcacgatagtgtcgtagtgtgacaccacaaaagaccgtttgcttttgtgcggccacccgccccagtgttcaaagatgtagttgtaggtgttcgcccccataagcaggcagcttgcggcggcgtgttcccttgccgccagttccttgacctcacggggcatccagtccagttcatagtccggcgtggcggtatgcccgtccagcgatacggcgatgtgcgctttgatttgttccatattgtcaggtattaaagtgatataaatccctactgtcttggcacgttagccgcaaccccaaaaaagaaagcgtggcatgacgctgtttcaaagtagaggtactggcatacccaaaagaggaaacagtacagccacgctatgacaaacgcatagcatatcctgcgctgaatatcccctctttttgaaaagtgccagttttctactttgggacgttcggcgaacgtatatgttatatataaaggcaatattccggcaaccgccgtccaactgccgttacttttccgtgtaacttctgcaaagttaagcaaataccctgaaaaatcacgtgcaaacagaaaaaatcctgccgtgtttccgggcagggcaggacacaagcacctaaaaatacacaagttcagcccatacgcctacgggcagcttgcgttcctttgaagatgatatgaaccgatgacaaaacagctttggttcgttgtgtctttggtgatgatgtccctttcccgcatgaagcggatatagctctttgcggtgcgctccttgatgtccaagacctgctgcaactgctcgcaaaggtctatgtaggtgatgcgtgtctgccgcccgaagatgtcacgtgcgacattcaccagttccctttccttgcgcttctccttttcctcacgtggtttctcgcccttgtacacgtgcatcccggcttccttgtcccaagcaaagagcatcagcggcacgtccagcgggcttccgtcccttactttcagggcttttaccaccgactgggtaggttcttcgtctttctctatcgaaagaatagtagccgccttgcgctgcaactcgctgcccaaatgtccccgcagtttcaaaccgttggggacgaagtgcagcacgcacagaatacacgtgttgtagatacccgccagccgataaagttcatctatcaccgccacgctttccgcttcatcgttggcactcttaacaaggtcggcgatgccgtcaatgacgaccaactggatgccgccgtactggtagtagaacttgtccatgctctgcacaatggcgttcaggcgttccttgcgtgacatgccggtaagacagaacgctttcagttcatcgggtttgtccggctgtttggcacgtgccagcaggttgcttacattcttgaacagttgcacttccgactgttcggtgtcgtagagcaagaccgccttgtgcctgccgttggcggttatctgtatgcccagcgtatctatgtcctcaccagccgggcagatgcagcccgccacgattgcggctacgtaattgctctttcccgttccctcgcccccggtgatgccgaacaggttgccttgtgtccccagcggaacgtcacccgccgaaataatctcttatgctttggcgggcgggttgttgaaatctatctcgcacgatttaagcataatcaatgtgtcgctatacaggttgtctaaaaattcgataaacagtttcaggaaatcttcacgggtgttcccggctttgaagtagtcggatatgtccttttcctctttcgttcccggaagcggtagcagcaggcgtttcacgccaaattcttccagtagtttttcctgcttgcatgaactttccctgcccgtcttgtccatgttaaagagcaggacgatgtgtttgaagcggaacgtcagccgatagaccagcgtgggcggtatcgtcaccgtttcgctgttgaagcagatagcgtgaaaaccgtgcgccgccagcgaaaacacgtctttctcgccgtccgtgatgaatagcgtgtcgcctttggctggcagttgttccagcccgaaacagtagttctcaccgaagctgccgccgtagaggaagcggggcgtggagaacgggcggtacagcttgatgtgctgtttgcccttgtagccgtacatgggttctgccaccgatgaagtgtaggtgtacggtttgccctctgccgtttcgctgttgtattcccggagcgagcagaccttgtaacgttccagcagttcgggcgtgatgccgtattgttgccgaactggtagggcttgacaggcttttcgggcgtttcttcggctttgtccggcggacggttgccgggggaacggaaaccggaatgccggaagccagccccaagcccaaatcccggtcgatgatttccagtatctccacgaagtcagccgcccggttacagtccagcccctttaactgccccacgaggaagaaacagtcgccgctgtaactgtcgttgccgaagtctttcatcttgtagataccgccccggcggtcgaaatagatgttgcaggaagccttgctgtcctcgtacagcgggttaaggaagttgcgacctatgcgccagttgccgggcaggtagtgtttgaacaccgccagcccgttacttgttctttctaagatttcctctttccttagcatataattggtggttggttatcaggttgtcgatgttctccttgttgctccttatcaggcgttcttccagcatccggcgtatctcgctgaccttgtagaagtaacgtcccctgatgttggaataggcgatagtccccgacacccgcaggcgttgcagggtcttttcgcttattttcaggaacgtgcagacctcgtagctgtccacccacatgtcttcctcgctttgccttgccgtttccatgtggttgaagatgtagtcggcaatggcggtaatcttgttgtccagttccttgtaggctttggactcgaatgttattatttccataacggtaactgattgatttgccgcaaagttcgggagaagaaataacctaaaagtcatggttatatctatcatcgtattactttttttcaaactattttagagtgaaatcggtgtgaaatctctgaaaaaatgccatttctcaacgtacatttcactataaaaagaaagtaccatgttggggtaaacatggtacttctatttattgaaatacagaggattatttcatatcatcttcattcatccgcttaacaaggctctctatcagatgatgaagatatgccgtccggtcttttctctctttcatggctatgtatgaagcgtaataatcccctaaatcaatatgaaatatcgtgctaaggaaattcattatttcttttatctccacgttgccattattgatgtcacccgaagatacaagagaatatcccagttcgataagatatgcctttttgccagtgaaacggaacgggtatttgaagcatctttgtagattatcttctatctgattattcgttaccagtttcaccaaccgtttattcagataaatgcgtagcatttcattggcgataatctttgccactttatagtcatatccggttgagaaattagggtctttatcgaattgtgcgctatcggtgcataaacgcaaatccgctttgccccgaacaaaataatattcatcgtacattgttgaacgtgaacgataatattgataaaagtccaaattgcgattgaagaaataggtcagattatccagttcccgattgatataattcctaatcacttcatcgctaccgttaggacattgtgtttctattcgataaatcttatagaagaataatagccgggcaagtatttccggtttctgtgtcttgaaaaataagatttcatcctctttggttggaaatatataggtttgtatttttgcccttaattcatcaagaactgtttgcagtttatgtaccattgaaagagaagtttcgataatatcatagccgtagaggtcgatttctgaaatatcaacctgtatttgcgctaatatcttatctacttcatctttcataacagacctatgtgttgtgtattttaatagcccgtttgaatagataagaaactataattctatggaataaccatattgcggcaaaatatatcctgcctaagatattctcgtatttcacaatagtagttatactgacttcctgtgttttatctttaacatccgagcagaataaagatacatgaaatgtcaggtgtttatctttggctcctataataatttcattatcattctgttctataatcatatttacaaatgatttattgatttttacgccaaacggttttacgattaagttgcgtatataatacatcctcataatccattttggatattgagaaaacattaaattgaacaattcatttacagacatatatggtttttctgtgatttcatcccaaaaacaatctttataatccgctgggagatatttgataatcaagttatttttctgtttcatggtttacctttattattttgtttcaaatttttcaatcagcatattttgaagtttattgaaatcacaagcagggatttcaggacagatatgttgcaatccaatcaataaggaatattggatagtagctattttatgcgcatactctacatcatatccgcaatcttggattaactttgtcaaatagtctaatctcaattcatctacttgtgcgacatattgttgtacaatatcatttgtataactccaccctctaatccgtccctcacatttgtattcagaggaagcagacatttgagataaggtatgtagcttttcttttgaactccctaatttttctacttcttcgataaatgcaagtgtattctcttttacccaaaaagccataagagcatctatatacccgtctatatttttgaaatgatgataaaacgctccttttgtaatttctaagagattacataagttgcctattgtgattttagcaaccccattgttttctataatttgaagcccaataacaaaccattgttttttctctactttcttcatattatcgttttataataccatactatatggtatgcaaatgtatgaaagaaatctggattaagcaaacagcactattcttttcttcaaaaatttagtgcaaggtgcaagtatatatttatatatatagcttgcaccttgcactaacccaaaaatatttattatcagatatttgcgagtttcaaaagaaagccgtatctttaaacctgaaagttaggcagacaaacagcggtcaaagttggacaagcccaacatctgaaaatcgttactgtttcgttacctatttgaaattttgaaagcaaagtagctgaaatataatcggttagagttgtaggttcaaaaccctctttctccgctgaatttactggtcagaaatggtcagtaaacagacaaaaagctacaaataaatgatttgtggctttttttattacccaaaagtccaacttccaagcgatgcaaaggaatgcattctcacaatttgttacccaatatcgcttgaatactgcttgtgaacttttccaatttcaaaacatggatgctttgaaatcaaaattacctatatttgaacattgaaacttaataaacaacttatatggaactatcagcaagtaaaatcccacgtattgaagtagtcgatgcactaagaggatttgccgtcatggcaattattttagtgcataatctggaacattttatctttccagtctatccaacagaacaaccagcatggctagccgtcttaaacgacggagtgtttaacgtcattttttccctgtttgcaggaaaagcttatgctattttcgctcttttgttcgggtttacattctatatccaatgtcataatcagaaaaagaaaggaaaagacttcggctaccgcttcttatggcgattggttctgttgcttggcttcgcaaccttgaatgccgcttttttcccggccggagacgtactgttgttatttgctgtagtaggtttggttttatttctggtccgcaaatggagtgacaaagcgatcttgatcacagctattatattattaatccaacctatagaatggtatcactacatcatgagtctgctcaatcctgcccatgctctgccggatctcggcgtaggcgccatgtacagtgaggtcgccgaatataccaaagccggaaatttcctggacttcatctggggcaatatcacgttaggacaaaaagcaagtttgtactgggctatcggagccggacgttttctgcagacggcaggtctattcctgttgggactttatatcggcagaaaagaactattcgttacaagcgaaacacacctgcgtttttgggtaaaggttcttattattgctgcaatctgtttcgctcccttgtattccttaaaagaacagatcatggcaagcgacaatgccttgatcaagcaaaccgtagggacagctttcgacatgtggcagaaatttgcgtttacattcgtcctcgtttcctcgtttgtactcttataccagaaagaatgcttcaggaaagctgtttcagctctgcgtttttacggtaagatgagcctgacaaattatatcgcgcaatcaatcatgggagcgatcatctatttcccgttcggactatatttagctccttattgtggctatacaataagtttactaatcgggttcgccctcttcctgttacaagtttcgttctgcaaatggtggctggcaagccacaaacaaggtcccttggaaagcatatggcataaatggacttggatgttctcgaacaataaataaaaaacatgaggcagtggatactgcctcatcaatatataagcctgattttatttcttcagaagaggcaaataatccccataaccttcttctttcatcttttctttcgggataaaccgcagtgaagcgctgtttatacaatatcgtagacctcctttatcggcaggaccatccggaaagacatgacctaaatgagcattccccgtctggctgcgtacttctgtccgggtcattccatgcgaagtatccggcttttcaacaatcagtttcttatcaatcggtttggaaaaactgggccagccacagccggaatcaaacttatcggtagatacgaaaagcggttcaccagtcgtaatatcgacatagattccttccctatgctcattccagtactcattgcggaatgcaggctccgtggcatttttttgcgttacggcatactgtatgtccgaaagtttattcttaagagtcacatcatccggctttgcataaacaggacgggcattagctttccgtgccaattcaaacaatttcggattaatatggcaataaccgcccacattcttatccaaataatcctgatggtattcctccgcagcataaaaattaacgagtgacatcacctcgatggcgatcggcttcgcatagtcttttgccaaatccttaatggcagcttcaatcaccggagcatcgtctttatcgatataataaatgcccgtacgatattgtaaaccactgtccccaccctgacggttgacactagtcggatctatcgtctgaaagtacaaatctaacagtagatccaagtcgaccgttcgcggatcataaacaaccttaactgtttctaccgctccggtattcccggtgcacacctctttataggttggattggggacttggctgttggcataaccaacttccgtttgttccacacctctgatctgtttcaagaaatgttccgttccccaaaagcaaccgcctgccagatatatttcagccttgtctttcatcttcatattttcttgtttcattaaatcaaactctttcctgttcccagcgttgccagccacactgacacatgccaataacagtgcaataatagcaatatttctcatagcctatctatttctcaaataacaaatcggaaatattttttgttgttatagaaaaataaagtcataacatataaatggaaaataaagattatcaaaaacgtgtggctgccatacatgacttgtcggggttcggaaaatgctctctaactgttgctttgcctatcctttccgccgccggaatagaagcatgtgccatgccgaccgccatattatcgactcatacaggaggaatcagcggatacacttaccgcgacctgacaagcgacatgcgggcttttatgcagcactggaagtcgctcgatatacaattcgatgcgacctacagcggtttcttaggttcattcgaacaactggacctcgtcaaagagtttttcgaactattcagatcaaaaaacaacctgatcctggtagatccggtaatggcggacaacggagaactatatcgcatattccagcctgagtttgcgacaggcatgagatccttatgcaggaaagcagacatcatcgtccctaacctgaccgaagctgctttattactggaggaaagctaccatcccggtccctatacgcaggcctatatcgaaaaaatcttaaaaaaactaagcaagctcggaccgaaaaagatcgtactgaccggtgtatactttgaagaaaagaaattgggagctgcgacctacgaccaaaggaaagattcgacagactacctgttttccgaaaggataccaggaagttatcacggaacaggagatgtttttgcgagcgccctgttatccggcctgctgaataacttcagcttaagcgaatcagcacaaatagccgtaaacttcacagccgacagtatacgccggacatataatgtaaaaacggactaccgctttggtgttaattttgaacaatgtatccccgactttctaaaagaactcaaactgatatagtttttccaattttatttttcatctttgtaaaaataacaagacaagaacatgaataaaactaaaatagcgatttccggtataggagctgtaggcggctactacggaggactattagctgcccgttacaaagactctgaagatattgacatctatttcatttcccggggtgaaaacctggaagagatacgtaagaacggcatcgaagtcaaaaatacattcctgacgatcaaagcaaaaccaaccctcgcaaccgacaatcctgctgaaataggaccagtcgattacctgttttgctgtaccaaaagctacgacttggaggagaatatagttcagctgactccgatcatcggccctaatacggttatcattcccctgctgaacggagcggatatagcagaacgcatacaaaagctattaccgaacaatgaggtttggaaaggatgcgtttacatcggttcccgcttggtcagaccgggaagagtggaaaagttcaccataaaggaccggatgttcttcggaagtaaacaaggaaacaagaaacgacagaaagacttacaggatatattggccaacgcccgtatccttaccacaataccggatgacattgacttggaaatctggaagaaattcttcatgatctcgaccgccgccactatcacctcctatttcaatgaaacgattggcgaagtggtaaataaccatatcgatctgttcatcacgttaggttatgaactcaaaagcgtggcagaagccaaagggattcgtctgccggacggtcaagtattctccgccatcgacgcccagaagatcatgcctaacaactccacaacctccatgcacagtgattttcaaaaaggcaatcgcaccgaagtggaaacattgacaggctatgtcgtacgaactgcccaagaattgggaatcgaagttccgacctatcaattcatgtacaaagggttgaccgaatttccctatccggtggcggattaatttcccaacaagggaaagagagtatgtcgaaacctaatggattttccggcaagctctcttctcttattcttactctgtccagacaaacaaatctaattattaatagtatatgaaaaacaaattttatctctattgtatcctgtgctttctattcaacgttgcaggatattcgcaaagtacagttttcgaatcgctctctttcgaaagtaacaaattaggtaggaaagtttcctactccatctacctgccttccgactacaacacctcgaaaaggaattacccggtcctctacctcttgcatggttacacggacaatgaaaccaactggatacagatgggacaaatgaaaacgattgccgaccgtgccatcgcaaacgaggaagccgtgccgatgataatcgtcatgccggacgcatgggacacttggtatatcaaccagtatgacggaaaagtaccttacgaagacatgttttttgaagaacttatcccctatatggaaaaaacataccggatccgcagtgacaaagaaagccgggcaattgccggattgtcgatgggtggctacggatcattcctgtacagcttgcatcatccggacatgttctgcgcatgtgctccgttgagtgccgccgttttcgacgacacagtcatggaagcacgaaaagcccggtcacataaggatttattcaaccgcctgttcggaccgggagacgaacactggaagcaaaacaatgtcttgaagatcctttccgactgggaccaaaacgacttgcccaaaatccgttattacattgattgcggtgatgacgacggcctgctggacggaaacatgcaggtgcaccaggtcatgaagcagaaagggatcaggcatgaattccgagtacgagacggcggccatagctggacctattggcggacggccttgcctgaagttctaaggtttgtcagccagactttttgcagaagttgacaaaaccgtaatattggtacatcaatccgtaattcgtgtaagttgcaaaccatttccttttattatgtttgcaacataaaataacagactatctaaaaagagtttattatgttgcgaacgatcagacttacaactgcacttatctgttttacgcttgtaaccctgctgtttctcgatttcacggggacgttgcatgcatggttcgggtggttggcgaaagtacagttcctgccggcggtattggcactcaacctcggcttggtactgtttctcattgtattgacctggattttcggtcgggtttactgctctgtaatctgccctctcggcatattccaggatgttgtttcatggctggcggggaaacggaagaaaaaccgtttccgttattcccccgccttgtcctggttaagatacggagccatggtgatatttatccttgccatgatcagcgggttaggagcatgggcggcattgatcgcaccttacagcgcttacgggcgtatcgcctctaacttattcgcacccctctggcaatggggaaacaactttctggcctacttggcagaacgggcagacaattatgccttctacgaaacggaagtctggctacggagcctcccaacctttatcattgccacagttaccttcattatactgatcatacttgcctggcggaatgggcgaacctattgcaacacgatctgcccggtagaacgtttttgggattgatctcccgtttttccgttttcaaaccggttatcgatacgtccaaatgcaatggttgcggcttgtgtgcccgtaattgcaaagcagcctgtatcaatgcgaaagtacacgagatcgactatagccgctgtgtcgattgcatggactgcatagacaaatgccgacaaggggccatccgatatacacgcagaaaaacaaacaaggctgaaacacagaccaaccaaccggtcgtagacaagcccgatcgtcgcaagttctttaccgtatcggcattacttgccacttctgccgcattgaaagcccaagaaaaagtacaactcccggacaagaaagtcgacggcggactggccatcatcgaagataaaaagaaaccggaccggacaaccccgatcactcctccgggctcgctgagcgcagccaatttctcccagcattgcaccgcgtgccagctttgtgtatcggtttgtacgaaccatgtgctgcgtccttcggggaaccttcaaacatttatgcagccagaagtatcgtacgagcgaggatactgtcgtcccgaatgcgtcaaatgttcggaagtttgcccgaccggagcgatccgtccaatcacgaaagcggacaagacggctatccagatcggacatgccgtactgattcaggaaaattgcatcgtcaaccgggacggcgtcacttgcggcaactgtgcccgccattgccctacccaggcgatcttgatggtggcaaaagacccgaacgacccggattcgcctcaactgccggtcgtaaacgaggaaaaatgcatcggctgcggagcctgtgaaaacctgtgcccgtcgcgtccgttcagcgccatttatgtggaagggcacgaacaacaccggaatatttgatcaagaaataaaagaatcatcacatatggaaaaagacaatcatcaagcgataaaccgtcgcgatttcctgaagattgtaggaatcagcacggcaactaccgccccgttgctctccgggtgcagttcggacagcgggatggcctcaggttcgggaagctccacccctattcccacggaccggatgacataccgcacgacgccgtccacaaaagacaaagtttccatcctcggttatggatgcatgcgtctgccgactattgccaaaagcagcgcaagagacagcgatgacgaaatcgaccaggagatggtcaaccggctgactgactatgccatcgagcacggtgtgaactacttcgacacctcgcccgcctattgcaaaggacgttcggaacatgctatggggatcgccctcagccgctatccgcgcgacaaatattacatcgccaccaaactttcgaacttctctcccgacacatggagccgcgaagcctctatcgcgatgtataacaattcgctcaaggagctgcaagtcgattatctcgattatatgctgctccacgggatcggcatgggtggtatggaagcctatgaaaaccggtatgtcaagaacggcatactcgacttcctgctcgaagaacgcaaggcaggacgtatccgaaacttaggtttctcctatcacggagatatagaggtgttcgattatttgctttcgaaacacgacgaatatcaatgggatttcgtccagatccagttgaattacctggactggaaacatgccaaagagatcaacccgcgaaacaccgatgcggaatatctgtacggggaattgcagaaacgggggattcccgccatcatcatggagccactcctcggaggacggctttcgaacgtgcacgaccatatcgtcgcccgcctgaagcaacgcgaaccgggacggagcgtcgcctcctgggctttccggtttgccggctcgtttcccggcgtactcaccgtgctgagcggcatgacttacatggagcacctgcaagacaatctccgcacctactgcccgttgcaaccgttgacggaagaggaaaaccgtttcttgttcgacaccgccgacttgatgatgcagtatccgaccatcccgtgtaacgactgcaaatactgtatgccttgtccttacggtatcgatattccgggaattttgcttcattataataaatgtgtgaacgaggggaatgtccctcagagcggacaggatgaaaactatcgcgaagctcgccgggcttatctgatcgggtacgaccgcagtgtaccgaaactccgccaagcggatcattgtactagttgcaaccaatgtaatccacactgtccgcagggaatcgatattccgaaagaactacagcgaatcgatcgtttcgtcgaacaactgaaacaagagacattataaatccaaacagccgtcccgatttcggacggctgttttttatctccaaaaacaccgtcccgatttcggacggctgttttttatctccaaaaacaccgtcccgatttcggacggctgttttttatctccaaaaacaccgtcccgatttcggacggctgttttttatctccaaaaacaccgtcccgatttcggacggctgttttttatctccaaaaacaccgtcccgatttcggacggctgttttttatctccaaaaacaccgtcccgatttcggacggctgtttctatgtccaaaaacaccgtcttgatcctcggaaattatattcccccctttaaaagtaatttcctctgaggtttaaacaccatatagttgaataccagaaacaccgtagttcctaacagggcaaaaaacgaaccgatcaatgccgtactttccagccctgccccatgttcgatcgacaatcctccaaaataagcccccacggcattccccaaattaaaagcaagctggaccatcgccccgcccatcatctctccgccaggagaatattgaagcaacaacaattgctgtggagaagaaactgcaaacaggcaaccagtacaaacgcacatcagcaaagcggacaaaaagccgtacgaagcaaaaaaataaatcagcagaagtgatgcaaacatcaggaactgcatggacatcgctacgataccaggtgtaaaacgatcagacaaatgccctcccaaatagttaccgacacacatgctcacacccgccagcaacatcaatacaggcattgtcccgacactgaaaccggacacctccgtcattaacggattgacatagctataccagcaaaaagctcccccgtttcctaacatggtagcagcaatcagcatccacggttccggccttctcaaaaaacgaaactgccctttcagattcgtcgccggcagggcgggcaaaacaggaacccacctccggataaaccaaatcgttacgccaccccacaacgctgcaatcacaaaaaccaaacgccaggacagaaagtgccccaggaaattcccggccgggacaccgaacaaattggcaatcgtcatccccataatcataatagctacagcagaagtgcttttccctttctccgccaaacggctggcaacaatcgaaccgactccgaaataagccccatgcggcaaccccgatacaaaccgggcacacaaccccatccaataatcggccgacagagccataagcagattcccgacaacaaaaagcccaaccaaagcaagcaagatcgtacgtagcggccaactcctggccaccaccactaccaacggtgctcccacacatacccccaacgcataagccgaaataagatgcccggcttcggataaggaaatatcaaatcctgccgccacatccggcaagatactcatcataataaactctgcaatccccaacccaaatgtgccaaaagacaatgcatacaaacctttcttcataacctattcaatctttctgtttttccggccgcaaagaaacaacaaaattattaagtgtaattgtcgcagattatgcaattattgtctaattttactgtgttttatcagaaagttcatccgacatgcacgagaaactaaaattcgaacaaatcaaaaaagatagttgtgcctcattacgctacgattattccagcttgtacccgaaagacgaaatgcctcttcattttcatcccgaaatagaaatatgttatgttgtgaaaggttcaggctaccggatgataggcgactttctggagccgttcgaggagggagaagtcgtactggtcccgaccaaccaaccacattgttggatgtataaccccgaaagctgcgagcctgatggaaaacggagatgcatagttgtgcaattcaatcccgacttgctacaaaccggcctgtctttttttaccgaatgggaatatgccgctcaccggttatcggcaatccagcaaggcatcctgctgacaggcgaaacagccggaaagatcaaatcctgcttagaagaaatgaacctcctgaatgcaagcgaaaggatgctgatgttgatccgcatcctgcaacaaatcggaaccacaaccgatttaatccctatcggtttgcaggaaacggtattcaacggcattaccaaaaacatgcaacgtatgcaactgatcttcaaatacgtcatcgagcattacaaggagaaaataactctttcggacgccgcaaacgtaatcagcatgagcacaacggcgttctgctcgtttttcaaacgtgaaacaggcaaaacgtttacaaacttcatcaacgaataccggatagaggccgttggcactttactccgcaactttccggataaggacattaacgaaatagcctggcaatgcggcttcaccgacattccctacttcaatcgctatttcaaaaagatgaaacagatgactccgaaacaatggagatacgaaatacaataaaaaaaagaatatcctaatatgaatgcagaaattatccgattcttagacgatttacgacgcaacaataataccgtctggttccatgaaaatagagaacgatatgacaaacttcgctgcgcttttatcaacgaagtacaagagttaatcgaacgaatcagcgtatttgatcctgatatacggggattggatgcccggaaatgtctgttccgtattaatcgcgacatccgcttcagcctcgacaagtcgccttacaagacttatatgtcagcctgtattgctcaaggaggacgtcatagtatccggggagcttactactttcatcttgaaccggaatactgcgtactgtctggcggtatctggtatcccaaaccggaaatattgaaagtccttcgacgtgaaatatacaataacatagatgaatttgtttccatcatcgaagagccttccttcaaagctctgtacccgtcactcgaaggggacatgctaaaacgtatcccggcaggtttcccctccgattctccttacggttatatattaaggcacaaagacttcagcgttatcggtattaagcccgacagttttttcagccagccggactggatggaagaaaccatcgattgttttcgaaagcttcttccattcaaccgcttcctgaatgaaattgtggatgaatatatgggaaatctgtaaaaacactattttccgcaaatatccttaaacggacaatacatgcaggctttgccgttcggggtttgcacgaatggggtttctgtgtcgaagatttcatccaagcaatttcgcaggctgtcttcaaaatccgtgcgatagttggcgaagtccaaaacttgttctgttttgaaccggtctgtacgatggtaaattccaggatcgaaagaggaagaaaagagggtcctcatataatagatacccggctgaatagctgttgaaagctgaactgacctgttatacatccatgcatacataaagacctgcataaccgctttggaacgatccgtatctgctttgtcgaaaagagcttctacagaggtaaactgcgtcgtcccgctcccactcttatagtcaataatgcggacgacatcgcgtacttcgtctatacggtcgataaatcctttcaactggatattgcttttatccgtcaatgggaaaaggcattttatcttcttttccgattcgatataacggaaaggagtctgttttgcgtcacgttccagcactttctccacatatttgcgaatcatctcgccgatcaggaagttctgtccggtgagtggacgaacaatgtccgttttaaagaaaatttcggcaaaggcacgggcaaccgctcccgtcaacataggcgtatcttttcggatcgctttcagcagatcagccgtcaccatctttccacagaatggctgatacaattcttccatcaccttatgcaggatacttccaaaaacattactttcgatcgtctcgcttacctcctcttcttcacgtattccctcgacaacggagaaataaaatttaagcggacaatccagataggtattgactgcactcgccgatatcgcccgcgtcccaccactccggaaatcagccagacggttcatgacttcctccgtcttagctacctgcaaggcaggagtcttggaagaagagacattgtaaacaaccagcttattctgtatcggctcctcataatgataatgcaactgatgcacgaaacggctaacctcgcctgtctgcaatccgttactccgagtatcataaagcaagctgacatggctggcacgataaatcaaacgatagaaatgatacgcccaaacactgtcctgatgttcgtatgtcggcaaaccgaatccacgacgaagattataaggaataaatgaattagccgctttcctcaacgggaaaattccttcattcatcgaaaggataatcaaccggtcaaagtcaagcgcacgagtctccaaaacacccatgatctgcaaaccggaaagaggttcaccttggaaaggaatcgtaattgtgtccgtcacacgtttcagcaaacggaaataggtatcgattttcatttttacattcgcctcccgcatgacttccttcatccggttaaccgtagcgaaataatggaagataaactcctgttcaatgtcgttaatagttgagagttgagagttgaaagttgaaagtggctccgcgtcactatttacactttcaactttcaactttccaccttcaactgctttattcagttcctgcaacacgttaatcaaataatcggagaaagtttccaccgcagtcaccggagtaaagaggatggacaacaatggcgtcttattcagatcgtcatacgatatgtaaatcttgttgttttctgaaatatcttttaccagattagaaaccatctccggagaagtagtcgagatataccgatggttcaggattggcaagacatcccggaaatagaacaccggcctccggtccacataacgaatattcttttgcaaagccagaatatattccatcaaagatgcaaccggtgtaccggccaacggatatcccatcgtcacattgatccgtttgatctgttcgggaatggcattcagaaccggaatcaacaaatgttcatccggcagaatcacagccgtccgcaacgcttcttccgcactcatttcgtcttccttgcaaagctcgttcagaatgctgcacacttgctttgcctgtccgattccggaagggatgccgatcacctcgatcttctttttgtcgtcatcttcattgtcaatagtcaattgtccattttcaattaattgcgacgggaattgccgcaaattgcgctccacgaagtaagaggccttattatccgggtccgtcactttcggagaggcgtaatcccagtaaaaatcagctattccccgtttttgcaacccggaaaggaaacgttcttcagccaccgagagggcattcagtccgacaaatacaacctttgtatagggcaggtcgcaacattcgtctttctccatctgttcgacaacttcccggaaaatcataccttcatatcctttgccttcggtggcaagcgcttcccgcaaatcggtatatagggcatataaaatctgccagaccgccagaaattgttcctggttgggcgtatctcctttcggataaaaagaagaccaaaaggtccggatagccgcaatttgttcagggctcagaaaactaaaatcattctctatctcacgcaggtccgtcacattggtgaagagcatacgggcatctgccatatatttatcgatatcgtcaaaatcattcagcagcatttccccccaatacaagaactcgtcgaacgtttcggaagaaccgctatgtctcaaataaatatcatatagtttaaacagcatgctgatccgatcggcagcctgctttccgctcaactgtacaaacagatcgttgatcgtcaggatcgtcggcgagaaaagaggcttctcagatacttccgacaagtatttctggaagaacagcccggtacggcgattcgggaaaacaaaggccagacggctcacttccgccccgtattcagaataaaaaagggatgcaacctgatataagaatggtttcattaattgtttggattaataaatgatgatttatcagtgtatattactgtaatatattttctatcatttgtatttcttccgctgaaaaggctgtattttgtaacgccttcaggttatctatcaactgtgcaaccgaactggctcccaccaggacgctcgtcacccggtcgtctttcaacagccaggcaatcgccatttccgctaacgtctgtccgcgttgtttggcaaggtcattcagttgtcttactttatttattttttcttccgtcacctgttcacgttgaagatggtctgtagatttggccgcacgcgaattatcgggaataccgttcagatacttatccgtcaacatgccctgtgccaatggcgagaaggcgatcatccctactccttcctgcttcaacagaggcaacaagtccggttcgatcctgcgatccagcatcgaataacgcgcttgatggatcaagcaaggcacacgatgttctttcaatacggcaagtgctttttccgtctgtccggcagtgtaattcgatatcccgacatacagggcttttccctggcggacgatatcagccaatgctcccatcgtttcttcgactggcgtctgtgggtccggacgatgcgaatagaaaatatccacatattccaatcccatccgcttcaaactctggtcaaggcttgccatcagatacttgcgacttccccagttgccatacggaccaggccacatgtcatatccggcttttgtggaaataacaagttcatcccgatattgccccagacctttcttcaggatacggccgaaattttcctctgccgatccatacacaggaccgtaattattggcaagatcaaaatgtgtaatcccattgtcgaaagcggcatacgcaatctgaataaagttactgaacacatctacactgccgaaattatgccacaatcccagagagatgaccggcaatagcaatccgctccgcccacaacgcctataagccatatcggcataccggttgtcatttgctttgtacatttccatataaagatatttttattacaatgaatcttttcagatatacaaatataatcaagaataccaaaagaacgggcaattcggataaaatgatcgcttctcggaggaaacaacatcaaccgggtataaacaaaaaaaggctatccgtcacggacagccaatcttcattgttaaccttaaatctaataccatgaaaaacacagtgcaaatatagagagtttatgttatgcagcataatatttccacaaaaaaagctttctcttaacctgatttaaccatttcatgttttacaacataatttttcatacacttttgacttagtcattccctgcacaaacaacagacacattatgattgaaacagcctacaatactggataaaaacgatccaaacaaaaaagcgactgcccggtgcgggcagtcgcctctttcctaccgatctgctaatgatcggaaaattaattcttacttattgaaacgttctttcaatttagccaacatatcctgagtcatggaatccagatcatattccggtttccagccccattcctcacgggcacatgtgtcatccaaagagttaggccatgattctgcgatagcctgacgtaacggatccacatcatattccatctggaagtcaggaacatactttttgatgttgttgtagataatttcaggatcaaagctcatggatgcaatgttgaaagagttacgatgaacgaacttcgtcgaatcggcttccataatttcaatagctgcacgcagaccgtccggcatatacatcatatccatgaatgtaccctgcttgattggacatacgaacttctcacctttggcagccgaataatagatatcaactgcgtagtcggtcgtaccaccacccggaggtgtcacataggagataagtcccggaaaacgtacggaacgagtatcgacaccgaaacggatgttgtagtagtcactcaacaattcgcctgaaaccttcgtgacgccatacatagtacgcgggttacggatcgtatcctgcggagtcttgtctttcggcgtgttattgccaaacacaccgattgaactcggagtgaatacagcacaatgcatttcacgcgcaacttccaatacgttaaacaaaccgcccataccgattttccaggcaagctgcggttttgcttctgcaacggctgacagcagtgcagccaagttataaatcgtatctaccttatatttggacacagtctcagcaatctgctgttcgtttgtaatgtcgacaattgcagaaggccctgattccagcagttcgcctttaggctcctgtccggggatgtaacctgctacaatgtttccaccgtagatacctctcaacttcatggttaactctgatccaatctgaccggtagaaccaattactaatacattcttcattgcgtttgatgttcttttaagttttttcgatggcaaaggtatagagaataaaaacattccggtatgaatttcttgtattttttagcctatatattcaaaaaaaatatgacctttgccgcatcggcagacaaatcagagacaaagaaaaaaatggtttcaagaataatattttgccacttgtctgcgataatagagatataattgtcaacttaattaaaaatactaacaaaaaacaaagttatgtacggtaaactgaaagatttccttactcaggaattggcaaacatcaaagctgccggattgtataagaacgagcgtatcatcaccactcctcaaagagccgacatcaaagtaaacgcaggaagcgacgttttgaacttctgcgcaaacaactatctgggcctgtctgacaaccaacgtctgatcaaggctgccaaagaagctatggacacacacggatacggcatgtcatccgtacgtttcatctgtgggacacaggatctgcacaaacaactggaagccgctatctccgactatttcaaaaccgaagatacgatcctgtacgctgcatgtttcgatgccaacggcggtctgttcgaaccgttgttcactgaagaagatgcgatcatctccgatgctttaaaccatgcctccattattgacggcgtacgtctttgcaaggcaaaacgctaccgttatgccaatgcagacatggccgacctggaacgttgcctgcaagaagcccaggcacaacgtcatcgcatcatcgcaacagacggtgtgttctctatggacggaaacgtggccccgatggacaaaatctgcgaactggcagaaaaatacgacgcattggtaatggttgacgaatcccactctgccggtgtagtaggcccgacaggacacggtgtggctgaacaatataatgtatacggaagagtcgatatcttcacaggtacgttaggtaaagcattcggtggcgccatgggcggattcacaaccggaaagaaagaaatcatcgacatgctgcgtcagcgctcccgtccttatctgttctctaactctgtcgctcccgctatcgtaggcgccagcctggaaatgttcaagatgctgaaagaaagcgatgctttgcatacgaaactgatgaacaacgtcagctacttccgtgaaaagatgttagcagccggtttcgacatcaagccgactcagtccgcaatctgcgccgttatgctgtatgatgctaaattatcccaggatttcgcagccaagatgcaggaagaaggcatttatgttaccggcttctactacccggtagtgccgaaaggccaggcccgcatccgcgtacagttgtccgcaggccacgaaacggaacatctggataaagcaatcgctgcatttatcaaagttggaaaagaactgaacgtaataaaataaaacatacgatttttcattattcacgtgtttttcaaggcttgattctgccgctaacccttaggcagcaatcaagcctttttttatcaaacaggttgtctttcgggataaaaaaattatctttgcccttttacaagtaaaaatttatgcaactcagtaactaccatagccattgtacattctgtgacggtcggagcacgccggaagacttcattaaattcgctgttgcgcacgggttccgcgcctacggtttttcatcccattcaccactgccgttcgaaacattctggaacatgtctaaagacgatatgcccgaatatctgacagaaatagaacgactgaaaaagaaatacagtgaccggttggaaatatacgtaggactggaaatcgatttcttagacgagagctacaacgcgtccatcccctacttccgcaatctgccgctcgattaccgtatcggttccatccactttcttccgatcgcacagccgcttgcggaagagaatatggtgtgtatcgacggtcctttccgggaataccagaagtctgtcgacgcctactacgacggagatatccgcaagctggtcgcccactatttcagttccacacggcgaatgatcgaggcaggcggaatcgacatcgtcgggcacatggacaagatatacatgaacgggcacaaatgcgaaggcttcgaccagcaagcggactggtatcaaaaaccgttcaacgactgtctgcacctgatcgccgaaaagggactgatggtcgaagtcaacacgaaaaacctcgtgaagaaacaggaggtctacccgcataccgactatctgcaccgcttacgtgagctggatattccggtgatggtaaactcagactgccactatcccgacctggtgaacgacggacgtgcggaagcattcgaactgctgaaaaaggccgggttcaaatccacccgcgaactgatcggcggacagtggcaggatgtggcgatctgacgcatttgtaacgctattgtaatacgtatttcatttcatcgaaatacagaaatacgtcctttgcagaaataaattatatttgtaataaaaaagagacaaagattatggatatgccgaagattcttgtagtggacgatgaagaggatttatgcgaaatcctcaagttcaatcttgagatagaagggtatgaagtagacacggctttcagcgccgaagaagcgttgaagatggatatagcctcctaccaactgctgcttttagatgtcatgatgggtgaaatatccggattcaagatggccagcatcctcaagaaagaagaaaagacggccgatatccccatcatcttcctgacagccaaggacactgaaaacgatatgctgacaggcttcaacttgggagccgacgactacatatccaagcctttctccatccgtcaggtggtggcacgcgtgaaagccgtgctgcgccgcacatcagacaaggagaaagtgccggaaaacgaatgcctcaaatacgaaactctctcactcgacacgaagcgcataaaagcctccgtagacggacaggaagtcccgctcaccaaaaaggaattcgagatactgaaactccttcttgaaaataaaggaaacgtgttctcgcgcgaggagatcctttcccggatatggaaagacgaagtatatgtgctcgaccgcaccatcgatgtaaacatcacccgcctgcgcaaaaagatcgggccgtatgggaagaacatcgtgacgcggctcggcttcggatactgctttgaaaattaaaaattgagaattaaaaattaaaaaataaacgaacgggcacttattcttacattccaagatgatttcttacttcttaatttttaatttttacttcttacttcttacttcttaatttaccccatggtcaagatagaatcaacgacaaacagcagaatacctttcagccagcgacttttctggtcgatattcgccatgttcctggggttcacggcttgcttcctgttgttccagtatcagcgggaacgggagtttgcccaagagaagttgaacaacgtgttggggaattacaactaccagttgttccgccgcacgcaacagactgaggatatcaaccaggtggttcaccagtttatcgacgacatcccccaaaaggatcttcgcgtgaccattatcgatccggcagggaaagtgttgttcgacaatagcggtgccgaggaattcaacaaccataacgaccgcagcgaggtacgcaaggcacgcctctacaatgaagggttcgccatccgttcgtccaactcgaccggcaagcgctatttctacacggcgacgaatatcggcgggtatatctaccgctccgccctcccctgggacccttacacacagcgcgtactgacgatcgacaaggatttcatctattttatggcgttgatgacgctgatatttttcttcgtcctctcccgcttcacgttcagcatcgggcggacgatctcgaagctgcgcgacttcgctctgaacgtggagaaagaccgcataccggagaacgaatatgtctttcccaacgacgagcttggagacatatcgaagaatatcgtcgggctttaccaccgccagcagaaggccaaggacgagctttcgatggaacgcgagaagctgatcaagcatttccagtacgcaaaagaaggtttcgccatgttcacaccggaaggcagggagatattgtccaacatcctgttcgtacagttcgcgaacctgatttccgacatgcagatacgacagtcggaagacgcggtcgacattccggaactggaaccgatccatctgttcctctccaaaaacatcccgaacacgaaccgcaagcggaaagtgttgcgcgaatcggtcacggtggacaagaacggaaagattttcctgatcgaatgcattctgttcctcgacaacagctatgagatatctatcaacgacatctcccgccaggaagaagagagccggatgaaacggcagctgacgcagaacgtggcgcacgagctgaaaactcctgtcagcagtatccagggttatctcgaaacgattatcagcaatccgcagctgccggacgacaaacgccagttcttcctcgaacgctgctactcgcaaagcacgaggctgacggggctgctgcgcgacatttcggtattgaaccggctggacgaagcttccgaaatgttcgagctgtcggaagtgaacatccaaaaactggtcggcgagatcgagaaggaatgttcgaaggagatggaagaaaagaagatcacgacagaggtcgctcttccgggcaaccctacgatctatggcaattattcgctgctctactcgatcttccgcaatctctatgacaacgcgatcgcgtatgcgggcgaaggcatccatctcacggtaagttgctacaaggaggacccgaaattctactacttcagtttctcggacaatggcgtcggcgtctcggaagaacacgtgaaccgcattttcgaacgcttctaccgcgtcgacaagggccgcagccgcaaggtgggcgggaccggtctgggactctccatcgtcaagaacggcgtaaacttccacaaaggacagatctcagccaagagcggactgggcaaggggatgacattcttcttcacactcaagaaaaagatttgattctgtgacttttctcttgaaagaaaagtcactactccttcacgctatctgtatttgttctattctgcccaataagacacaaaaattataccacaacacataatcaattggataacaaaataataatcaagcaacaaccggcaccctctgtccaaattttagacaggagtgtcctatattttgacagtttcgcatcgccttcctcccggcaattccaacatttttcaatatatgttgaaaattaaaggataaaataattgtttcctacccaatttaaggtatatttgtcagcgatgtgatgcccgataataaagatacggaaaaaaacatcccggcgggactcccgacagcacaaaaacaaagaaaaacacgttgacgggactcccgacagcatgaaaacagaagaataatatttaaacgatgtaccatgtctgaaattaaaggttttgatttatcccgtcttacccaagacgaaaattttggcttccacagtttcgcgatcgtggagtttgagaaatgcaaagactccaaaatcacagagttcgtaaacaactacaaagttaaatacaacgtatttgacggttccatgaaagtcagcggcggcgaaaacgtcctctcctatgatgtcacccgcctcgacaaggtccgtgacgatgcctacagaggattaaaacgccagaacaatgtcgcgatgaatgatttcaatccggtgatcgccgagatcgcccgccaaatcgatatcatcctgcgccgcaacggcgatccctgctcactgccttacctggctgaaaacagtgctgtgataaacctgatccaggatttggaagaatttgacaaccactcggaagaagaagaacgccccggcgaactgtccgatccgaccaactcgccgttggacggtgtttcgctggaagacgtcacgaaccgtctccagatggccggcctcgaaagatgggtgatgcgattgaaggaagcgaatgagaaattcatctccttcttcaccaaccgcaacagccagcaggctaccatcgtcaccggcgcgaccaaagcggcccgcttggaaaccgatgccgcctaccgcgctgtcgtcaaacgcctcaacgcgctggccgaagtgaacggcgagacggactatctggagatcatcaataacatcaaccgtctcatcgaccgccagaaagccatcctcgccacccgcaaaaccatcaacgccaaaagagccacccaaaagccggaaggcggcggcaagccgggggaggaaagaccgggggaactgtaaacaattgtcaattgtttttcacgctttctaccggatttgcattcgccgccttccaactttggaagaataccgccaggaaggagatcaggaggcagaaaagaccagcaacgatgaaaatcagcgggctaagcgcgatccggtagctatagtccgccagccattgcttcatgaaataccagctcagcggcgtcgcgatcacgaacgcaatcccgacatatgtcaggaacgtaccgacgaggcgcaccaggattccgcggttgtccgaaccgaacaccttgcggatcgctacctcctgcgaacgttgcaggatgaaataggtcgacatcgcaagcaaacccaacagcgagatcaggatcgcaatgcaggcgaagatcaccacgatcttggccagacgaatctgcgattcgaaatgcgtacggatgccctggtcgataaactgtccctcgaaaggaacacccgacacctcctcgaagactttgcgcacggactcgtatgcctcgacgggatcaccctgcacctcgaccacgtagctccacggccaccagcctgattccatattccggaaacggaacattaccggcgaattttcctgcgtaatgtccctcaactggaaatcacggatcacccctaagacgggtgtcacatcttcgccccacctgaaagaaggggcatcttccgacaattccatctgtttaaaagccagctcgttcaaataccatcccccatcggcgttggccacccggttgtccgacttgatctcgaaaccgaaaatgcggaaagcggcgctgtcgacctgtatctgctggaagctgagcgatttgtcctcgtaagttccactcatattgttcgtcccgctcgaaggtgttccgttgctatggccgacagccttgaccatcggaagctggcgcaacatatcttccgcccgttccatctcgcttttggaacggaaaatgttatccgattcgattatgttcgtcgtgttgtagcccaacggcgcgtggatcagatggtcgatctggagatacatcgtcagcgaggcggcgatcatggcgatcgtgatcacattctggaacgtgatgaagaccttgctgaacaccatcttcgtctgccggcggaacgtcccgcgtaccacgtcgatcggtttggccgatgagatcatcaatgccggaagcacccccgacaaggctcccgtcaacacgataaacaggaggatcgcccctatccaaagcggtgtcgccagcacatcgaatgtcaagcgcacctgcaacaagtcattggcatacggcagtgccgccttggcaaacatcagcccgatggcaaacgaaacaactgtcaggaaagtagcctccaacatcaaccgcaggaacagttccacacgcgaagaccccaagaggcggcgtgtcgccatctccttcgcccgctggccggcctgtgccaccgtcaggtttatatagttgatgatcgcgaaaatcaggatcagaatgccgacggacatcaagaccaacgaaaagcgcttgtcgccttggttcaagctatgcgacgccgtatttccgaaatagatatccgaaagtggaacaacgcgtgcttccttcacgaaatcataccggtaaatccaataccgctctttgaaaaagctctgtatctcatccgtccgccccttcaagtccatccccggcttcagcaacaggaacgagacgcacgagccggcgttacccggattcgtcttcgacagtgattggttgaactccgtcacccgctcgatacgcaccaacaggtccgcattcggaatcaccgaacggttgatgtcttccatgacaccggtaaccatgacactcgtcgagtcgctgatgcgcaagctcttcccgatcggatcgtcattgccgaacaccttacgggcaaagctttccgaaacgaccgcgctataaggatcttccaaaagccggtcgcggtcgccatcgagtatcttgaacgaaaagaggccgaaaaacgtcgaatccgcatatacgagatcggcagtcaacttcttgtctccataaaaaatttgtttactcttcccttgatccgtgatgaccggacagactttctcgatctccggataccgctcttccagccaataggaaaccgggacacccgattccaaaaactcttcattgccgatggcaacgatccggtcgtaattcgcctgttgtttgtcgatattcaattcccgttccacatacaccgcaatcaggatcacgaacatcagcgaaacagacagcccgaagacgtcgatcgccgtataccccttgttccggctcaggaatttcagaaaagattttatatttaacagattattcatagtgtattccatttataattcataaccccaaactcatatctcacaaagaacatatccgactttcccaagccggatatgatcacaaaacaattagaatgtgtctatgttctattttacaaaaattaaatgaattcgtttacggacgacacgatacttccgtcgaacaggttgatcacccggtgggcgaagctcgcatcgtgtttggagtgtgtcaccataacaatggtggttccttctttgttcagttcggtcaagagctgcatcacttcggctccgtttttggagtccaggttaccggtcggctcatcggcgaggatgattttcggattcgaaacaacggcacgggcgatggcgacacgctgctgctgacctccggaaagctgctgtgggaagtggttggcccggtggctgatgttcatgcgcttcaagatgtcattgaccatctgcttgcgctcgcttgccttcactttgagataggtaagcggcaactccacgttttcaaagacattcagttcgtcgatcagattgaaactctggaacacgaaaccgatatttcctttacgcacctgcgtacgttctttttctttcaagtgtccgacttccctgtccgccaggtaatagtcgcccgatgtcgggttgtccaacaggcccaggatattcagcaaggtggacttgccacagccggaagggcccatgattgccacaaactcaccatccttcacttccatcgacacgccgttcaacgcgatcgtttccacctcttccgtacggaaaaacttacttaatccttcaattttaatcatgactgtatctgtttttttattattgcttcttcttgcctatctataggcaaacagcgtgccaaagtacataaaccatttatttacaaccctataataatttcaatattttccgcgagtgtctaatttttggacagtggtgtaaagatattagacactcgccgggaaaacgagatcccggattattccgatttcaagctatcgaccggatcttcgttcgcgacatcccagatgcggtacacgatacatatcaagaccaccaggcagacaaacaatgcccctgccaagaagatccacgcactaagaggtatcttttccacaaactgctgctgccagtgttccgcgacaaaataagatatgccgcatcctaataaaatcgcagggagggcgatacgaaggacgtctttcaagaatatccgtagaatatccttcatcgtagccccgttcactttgcggatggccaattccttgcggcgtcggttcacttcgtcgttcgtatagccgatcaatccgatcagggagattatcagcgttattaatcccccgatcatcacttcgtcgcggaacttccgggaactgctgtacaggtcgaccatctgaacggaataaaccgtcagtttcggctcttggtccggcatcagctctttcaatctctcatttacttttccgactgcatcaggagtcatccggtggaatttcaccaacaaatgggcagaaggacgttgacggtagaacaagacggaaggacgtgcatccatatcgatgagcgaacccatgatataattctcatataccccgcaaatcgtataatacttcgagccataccgatcatgttccgatatataaatggatttaccgactgcaccgtccggccagtccacgaattctttcatcttctccacaaaagcacggttcaccatcacttcgtccgaaactgggatattctcggtgaacgagcggccttctatcaccggtatttccattaagtcaaggaatccgttgctcacccaatactggtctgcaatattaaaaagttccttttccgactccggtaaagcgatattattgcccgacatcgaccaaaaaggtaacgaataggaagtcgacaccgcttctacttccggcaggcgcatcacttcatccagcaccttataacgagtcgtggaatcgatcgccgaaatactgcaataggccagccggtcatacgaataacccggatcactgttcaccatatacgcatgttgtctgccgacaatcaataacagggtcaccagcaaacccgctgcaataaactggaggaaaagcagacagagtttccagacacggcgactttcacggaaattacggaacgcggcagccaccggaatacgggcgaacaaacagcccggaaccaagccggtcaccagaaacacaatcacgcaaacccccagtagtaccaaagcccctttggataataacaacgtttcgaccgaaacatccaataaatcataaatgatatcccgacaaagaaaaatcaggaaaatactcaccatgatcgaacagaccatgtgtaccagcgtttccgacaaaaccatgctatggatattcgtttccgaagccccgtacgacttatgcacggctacttctttcgtccggttgacgatcgaagaaatggtaatgagaatatagttcatgatagccgtgaacaaaagggcaaaggccagaatccccaacatcataaccatgttttttacctctcccgctttgctatgcaagtcgagcaagggcctaagcgtataagtcagttcgtagcccgactttctcaaagcttcctgatcgtggtgccggagcgtcatatcatgaatagccggagtcaggctatcaggcgtgactcccggtgacagacgcacataaccggcataacggtcgttacccaaccagttgttcaaactctccggatccatgccggacatggcaaccaacatatcgtaacgcaagctggcattctggggcagatcctcgaatacacctccgatcgtcacctccaaaccgggattctcatcggggatgatcgtcaagccttccactttttcgatacctcccatcttttccgccaacgaacgggatatcatagcataccacggtttggccaacaccactttcggattaccggacaggatcggcacagggaagatatcgaacacattactgtcggccatcatgatataacgggcggaataacgttgtttgtcaggtgtcgtgaacagggtattatctccaccgatataggtaagccgggtagcgtcttccacacccggaatctcactccgcatagcgggagctacagcaccgcttacctgataatagtcttcctctttcccgttcatgctataattctcatagatccggtaaatccggtccgcatccggatagaaggtatcgtaagattgttcaaaatagatcttcgcaatcatgaccaacgcaacagacaaccccacactcagcgagatgatcttcattacattatgacgtccttttttgaacaatgagcgtatggcaatattcaagtttctcatatctatcgtgtttatctgcttttcctactatcgttactctgatttcaaactatcaaccggattagaattcgaaacggcccatgcacggtacaggacacaagcaatgatcaaaacatagaccatcatcgctccggccaggaagatgaaaaatccgatgggcgccttttccgtaaatttctccaaccatcccgtaccggaataataagcgacagtcataccgatcacgatagcgggaatcgcaatataggaaatgtctttcgaaatcatcttcaagatactccatgccgtcgccccgttcaccttacggatcgcaatttcgcgtccacgacgattcgtttcgtcactggtatatcccagcagaccgatcaatgcaataatcaaggtcacgattcccccgatcataaccgagtcgcggaacgtgcgggaatccttatacaggtctatcatatccatataataagccgtcaccgtaacatttcggtcgggcattacatcttccagcaccttttgtgccttttttatattctccggtgacatctcatggaatttgatcaggatcatcggtgcatatctatcatagaacagggcggtcggacgtgtatccggattaccggtactgccaatacaaacatcttcatacacaccgcagatggtaaacggttctccattctggctatgttccgtaattataatgttcttgccaatcgcactcccggtccaaccagccacctgttccatcttttcgacaaaagaacggctgaccatcactttgttcgaagccgaaccgtcagaacggaacacctctccttcaataaccggaatctccatcaaggaaaagaaatcatctttcacccagtacatatcggcaatattaaacagttcgcggtcatctccaggaagtgaaacattatttcccgacatccctgaaatcggcaggtcatagcaggcagaaactttgtcaacttcgggtatcttgcgcaattcctcgattgccgtattacggacggattcttccaccccctgtgtcgagcaataagccaacttctcataggcatatccgggatcgacatttaccatatagtcatactgcttattgataaccgacaataatgccaccagataggctgttgccaaaaactgtatgaacagcaggcaaagtttccagtacctgcgggattctttaaaattacggaatgcggcagccaccggaatacgcaggaacatataggtcgggatcaaaccggtaatgaaaaagatcacgatgcaaactcctatcagtatcacaatagtctgtgtcgagaacaatgctcccaacgttgcccctaacaattcttccgttttcgtacggaacagaacgatcagaaaagcggcaagcaacaaagaaatcagcatatgcaaacacgtctccgacatgatcataccgaacaggttcttatctgaagccccataacatttatgaacagccacctctttggttcggttgatcaacgtggaaatcacgataagcacataattcatcgcagccgtaaagatgagcacaaaagccagaaagcccaacagggaattcatgctcttcacctcatcactgttactgtgcatgtccatcaacggaaccaggctataagtcaaatcaattcccgcttttttcacctcttccagatcgcaatgccgtccttgcatctcacgaatggcagtcgtcaggctttccggatcagtgccgggataaagttttacatatcccagataacggtcattccccagccaattttcacgactccacttgctcataccttccaaagatgcaacaatctcaaaacgcaagtgggaattttcaggtacatcttcaaacacacctcctatcgtataggtttgtcctggactggattcaaattcaaattccttgttcactgcctgttctgcacctcccaacagtttggcaatgcgattcgagatcatcacatatcccggacgggacaaagtctctttcggatcaccgatcaggataggacgcggcaacagatcgaaaacattcgtatcgcccatcacgacataacgggcggaataacggtttccatcctgtgtcttgaacaactccttgtcacccccgatataggtcaaacgagttgctttttcaacctccggtatctcgacttgcatagctgtagccacgcctccgctcacctgcccgtaggacttatattcaccatcccggatgatgttttcgtgcaaccgataaatacggtcgctgtccggataaaacttatcaaacgaacgttcaaaacacactttcgatatcaggacaagtcccatcgccagtccgactcccagagataaaatctttatcccattacttcttcctttcttaaaaagcgaacgtaatgctatgttcaagtttttcatatcgcgtatttattatattccgtccattaaaattcaaaaagcgtgccaaaagagtcaacgagctaaaatacaaatagataaaagcacaatcatttttttaagtgtccaattatttgacaatggtgtacaataattagacactcctgatgggtaaaacatcgaaactagttcacggaaatgcaattgacgtcccacaaggatatttcatatattttgtacttttgcaaacatgaaacggaatatactcgctctttatctgatcaaactatccaaatggttcacattggttatgcctatcatcgtgcttttttacgaaaaacacggattaggattgcaggatgtgtttatcctgaagagtgtctattcgatagcagccgttgccttggagatcccttcaggctatctggctgatgtttggggacgccgcaaatgtctgatattaggatgtatccttttcttcttcggatatctatgctattcgttcacctcgacattcacggcttttcttttcgctgaaatcttgttggggacaggacagacattggtaaatggtgcagattccgctctgttatacgatactaccgcccaatacaagaaagaaaatttatacttacgatatgaaggacggatcacgatgatcggcaacttcgctgaagcgctggcaggtatctttggtggtttattggcgacttattcccttcgtcttcctttttatgcgcaggctgtgattgcatttacaggtattccggcagcattcatgcttaaggaggtcaaccgttccaataaaatacagaatccggtaaacgagattgtccggatcatcagatattcgctggtaacgaacaagcaactttgctacaatatcatgtattcaggtataatcggggcagcgactctcacgatggcttggttcgtacaaccggttttaatgtatctgaaaactcccgtttcctggtatggcgttatttggacggtactgaatctgacagtcggcttcgccgctctctggtccgaccgggtggacaactacttcggtccgcgtaagatgggaatcctgatcctcgtttttatagtcggcggatatgtctccctggctttcaaccttacgtacgccggccttgccatcttgttcgtcttttatatcttccgcggttttgccacccccatcctcaaaggatacatcaaccaaatgactttttccgacatgagggcgacagtgctttccatccgcaacttcataatccgcctgatgttcgccgctatcgccccctttatcggttggctgaatgacatgtattcgctccaggttgccctactcgtctcagcagggatcatattgctgccgggagggatatttctggggcttcagttcagaaaagaaacaagttaaaaagggacattgcacaaattgctgatcttatctacattcttgatataggaattatgctcccacagacgtccggcacaatattgatcgaaagtatcctgcaatgatttctcatcatcaaggctattcaccagttccggtatcaagatctcggcaaaaacaaaaatgcctttttccggtacaaggacaagattgctcttgggttgtatagacattgatttttcaagcatatcgagtgggacaatgcggtaacgcttttcaccttccttatccgaaatcaataacagataatcagtactacgagccggagaaataaatagtatatcatcaatcgaaccgacaaaagcaaaaagcatattcggttgtgacattccctttttcagattggacaggcctacttcgccattcttaaaaaccgtaaccagcaaatcttccttgtcttccgggttataagagaaaataacacttcccccttctcctccccactttccgatcttgggacttacggaataggctattttgccatttttaaataaggagacaaagacatggttgggcgtgtatcccaggtcatgcttcttttgcaaaggattgcaacgcagagctgatgtccggattcctaaattaatttgagtgtttgcatttttagtgcgcaaagccttttcctggacattttcttcgtttacggacaaaaccggagcaaccgcttccacctcttgaaccgctgtcatttcagggactacagaacgtttatcaaaaatatattcattccgttctgcactaaaatacgcaggaaactccggcatcttaggaacagaatccagcttttgccgatggcgcaacttgacaaaatccgccacgttgccaactggtttgatcagattggaactggcagaacgcgtatatacttcacctttcacctctaccacttcattgattggcgctactcgaaacgccaaaaccagacgtccgtcttcatattcatacaaacggcaacgtatatacgcctgataacgatcccgatcttcttttttacctaatagcctgatcacattttgattgacagaacgaaggtaaacatcgctgtcattatgagcaaaccttaactcctggtccaatccggtcagatatcccttatcattgactccgatataaagtgttcccccttccgtattcatgaacgatgcaatcacacgagccaggacaaggctctgctcctctgtcgcgtttttgtcggcatggataaatgcagatgtcttaaattctttttctactccttcatggccgaaaaatacgggtatgtacactctagtttttttctcccagactttacaaccaagcaaaacattaatattctcgcaaatcagttcctgcaggtcatcatccttttctttcagataggacatgatattaaaatagcgtgccaactcagctaccgtacggtttttattttgcataaacgattgcaaatcggactggacggaagtcaggggacgggagtcgaaccaagtctgtaatactcgtataacctgtttgttattacgcaaacgcaagctgtaccggtccatatctaacgcttccatacgatccgacaatcccttaaaagtttgccggcattcaactccctctctgtttttcaataattcggagtccagtgaattaacccaatagatatagtcggaacaaagcccgtaataatcagccaattctttgtttcccacaaaacggcacaaaaatatcaggacattataagcattgaagcatccacatatatcttcgctgtcgcctatcaacgaatctacacaataaatgagttccttcaactggctcaccgttatcctatccgactcgtcatataaatcgggagttactgttttactttcactttcaggcatctcatcagtctgagccgattcatcaagagcactctccggaacttcaagatttaggctttggaaagcgacgaagaaaggattgtttttttctttcaaacgttgcaactcttccttgtctttattgactttcagcacttctttcgtcatgaagaaaaagaaactgcgcaaattttccaatacattattataaaaacctttttcgtctggaaatgggatatgggacagcactttgatcgtatttttcaatttgtccgccgataaacctccatattccaccttatagaagttaccggccttatacttcttatggggattagtcgttgttgccgtcatgccggtagaaagcaaccaccagactttgccttctgcaatatcgatcactttcccgattacatttttcttcctgacacaatccggatacatatattcattgaaatcctgtatcagggaaagcttgacttcacttccttccacgctctttactttcgcacggaatatctcgttgacaacaaacatatccataaaaccagggatgatataatagcatgaatttatgtaagcgaatggcaaacaggccttcattccccggtatggggcatctataatttccatcttcagagacatgtcttccttgtcgatatgcaggatccggaccttgacccgttgatccggacgcagaaaatggtctgtctccacctcttcctcttccatctcgatctctggtatctcaatctctttctcatctgatccggtatccacaaaagccggagaagacattggttgcgacaaaggataatcttccgctaccagattccaatatgaacggaaatcacggatattcttacaagcatcaaaattcaaagataaccggctaaaagaagcgacaaacaaacggtttttcaacacagtagcccggtctttacgccctttccacgagttacatcccaattcaaccaatgggctcaacgtaaacccatcgttatcaagggtgatcatatttttttcatttcgacattgcctccactttttactatcttcctggaaaagacatgctttatcatctgcttgtagcatgatgagacgttccaagatctttatctcatcaaaatgttggagatgctcccactggatacggtcacccaatgtattctcgccagtgagcaaagtatatgacttatttttcagcagttcactatacggtgatggtatacgggaaagataacggcatatacgggcagcaatcagtgaaaggtcatcctccttttgccgacattgtccacagatcaagaagacaaaagtatgcaaacggaccgactcggttatcagaggatgaagcgtgtcccaatcatcggagaaccaatattcagataccttatcatccatctcctttgctttccgtttcaatacgccggaaaaatcactgcattcctcttctgtcatcagaccattggtaattagcctgcaaacgatatcgatcagtaccggaagattctgggaaaaaccagtcaaatcgtatgacagcagataatatatttttaggatctcgtcatgtacatgccaaatgtttccactctgttccaacttacgcaaaacagccttcagatattcattcgtctttccttccgacaagcaacggcaaactttcagtttcaaagaaagacgatccatcctgtcaaacagttcagttcttttttcatccgccctcctctggtatactgtttgcaaatagtccgattcctctcccatccaccggcaaaggtcgaaggccttctctaaagctttagcggcatcctttccatccaaggccaggcaatctccatgtttttcctgaaaagcagccaatgcctcgatccatccaatctcctgattccgatacaggaaacgagcttttttcaataatacatctgaagcaggataatgcgagactttattctccaccagcaacttcatattaacatcacaggattgaaatacaaaagcatatttttccacaatactatcagataagttttttcctgttgtcgacatttctttatcaaggacaggtacatcattcatcatagttataatattaaaaataagattattaattcaacaattaccctctaaaaattatatatatgagtccgaaagtactcatttaattccaagcacaaaaaaattccgactatattttaagaatgaccataaaaaagaggcctgtctcttactccccaaaaacagacctctttacgaaaaagtttccataccttccatgccaccagaccatactcggcagcatccagccaaccttttttcacctccattatcatagcataggcaaacattgcagaaccggatgcttccagccagcaatcagttttatccaccaacaggttccacatgccgctttcactctggcaatttttcgggctcttcatcataagacgatggccatccaaaatgcagcatgattgggattatctctcggtgtcaatatgaattgttaattatccatattcgccttcttctcgagcggacagataattagtcgtctaatatatcaatttgagaaatcatcaaaaaaggaagtgcgtcaagcgcggggacaagtacattttgacacacttccttttacggtaatttatttggtataaattaattagcagtctgattttctttttctgtctgaaccgtctgtctcgctttcatacggaagtccatatacgatttcgtattcaattttggaaaaccatccttctctaattgcctgccaaccttttccaaggtctgaatattctcttccagaatggttccatccggacgagggccaatgttcaacaataaattagcattcatatctgcgcaatatctcaatagctccataacctcttcagccgatttctgccgttgtcgcgaagaagtatgatatgcccaccctaaagcctggatcgggatgttcaactcagccggcttttcattattgctctcccaagaaaaatcggcagcgtcctgtacctttttaggtaatccgacacttttaaagacaggagccaatgatcccatttctctttctccggttataaaatcctcattaccgttcgcacctgttttaaacacgactaatgcatgaggctgaatctgatgaatcatatcatatatttcctgaatattaaaaagttcagaatactgatacactcctccaaccgtatcaaaccatataccggcaatcggcccatattgagtacacaattccattatttgcgtttttgcataattcagataatgcttaaaatcttccacattacggaatctgtaagactcaggaacctctttatagtggggacgagccggatcatacatcatatttggcaaaaagtagggatgatgccaatctatacccaccgaataataaataaacaggcccaatccggctttccggcaagcgacagccaactcttttacaaagtcacgctgggcaggataatccatactattgcaatccatcaaatactacaggaatccctgtcttttcaaaaaatcatccgtcaactttcgaaccttataatactcttccgtaagcggctttctgtatagaaagatcggatgcccggcaccttcaaagagatggagttcacaatccactcccttctgcaaaagtttatcttgataggcctcgatcgtttcgaccgatacgataggatctttcgtgccaagcaatataagagtggagggagttgcttccgacacatgatggatcggtgaaattttttcaaaatccctttttatttccggaaaaccataacctcgcgaaaccatgtctataaccggataatataacagggagaggttcggcctgtaacccgccggaacagtctcatcactcccgatcgttccgagtgcagcagccagatgtccaccggcagaaccaccggctacggcaatcttgtccggatcaagctgatagtccgaagcatggctacgcaaccaacatatcgcatctttggcatcctcaaaactctcgaacggagtagaatggtgcagatatccgatacgataatcaaccgatacagcaaccattccttttgaagcataataagcacattcacgataaaactgaatcggagtacctaacttccaacctcctccgaagaagtatacaatagccggccttttttccccagcctgcatattccggggcttgaagatgtgaagcaccagggaatctccatcctctaatgtcttataccgaacgatttcaggggagaacaccgtcttcgatgaagccagtactttctttaaggcctcgaaccagacagtcgccatcttctccgcaccagccttattcggatgtactttatcgtgtaccgtatagtcttgccagttaaatccctgagcctgattgaccaaaaagacctgtccggagtttaatccggcaaccatttccgcaatcttctcgttcaattccgggatatacgaatatttaggcagtttcccgcttggtattacctgggcaatcaaaatacggacattcggattgatcgcctgtattttgttgataatagacttgtaagaagctatcattccgggaataggtttctcttccgcaaaatggttatgaccggcatggagcaatacaatatctgccggataaagccggtaaaggctgtcgatcttcgactccagaaactccacattcttaccgctgaaaccacaataattaagcgtcccgatccgacatttactctcacgaggaccgataaaatcaaactgatacccggctgtaaataatttttcccaaagcggatacaaatagcaagtgaagaaatccgctccttccgtaatggaatcacctaatcccatcaaggtaaaccgttcctgttttttctcttgtccggtggtagtaacggaacagcacaataaaaaaaataatatcagatataaataaagagctttatgtttcatggctttttaaacttgcaatagttttatgggcatatattaaaaagatgtgtgtcaaaatgtgattatccccacgcttgacgcagagacaagtacattttgacacacaccatacttttctgattattggacaaccggtttgtctttcaacataccgccttcattataacgctggttattcggtagccctttcttattcacaccttctttcatcaatgtcttcaaatcttccagatgcgaacggtaaacaccacgaggtgtcacatcatatttcttacacaatgatgcagccatacctactacctctcccatcattcctgtcgtacgcatcacacggaccgttcccaatgccacatgagtcacactaatattacgaccggccataaacaggttctccacattacgagaatacagacaacgatacggaacggcgtacggatggatcagaatatgctttgtcaccgctttgaactcattgcctggaaaatgttcactgtttttcggatcctgccaatgtaaatcgatactccatgtcgtggcgaaagaagcatcttcatgagacacgtttttcgtgatatcgtcttcctttaaaatataatcccccatcagacgacgtgattcacgcttgccggcgacataagcaacccaacctaattttcggttcttatactggtcattttccttcatacggtttttcagataactccagtttgaatagacaaccagcattccataatcacggatacgttcgaagtccttgatctggtcgaagttcatacctgtctcccacgtccattctcccatcatcaccttttcacaattcttgtcgttaaactccactccatagctgaactccgggaaaggactcgatttcttgttatccacagaataccactggacggaagaacccattgtcaacttgtctgctttctccggagcgatgctctcaccatactcgtcacgaccttcacgccccatacggtagtcggcccccgccaggtaaccgatcgtcccgtctcccgtacaatcagaaaacagaggagcctcgaacttcagttctttaccgctttcgatgtgtttgacaataaccgatgtgatcttatcaccttcctttgtcacccctatcgcacgaaagttcaggaaaagagacacattcttttcacctgctagccaatccattttcttctggtcttcataatattctgcaggttgtgcatttcctcccttttccggaccaaattctttctgcagaccgccaagttccttataagttccttcttcgatacggcctcctaaatggacacgtatctccgaactgttattaccacctaccacaggacggtcattaatcaaagctaccctgcaacccagacgggcggccgacacagcggcactcatcccggctataccggctcccacgactacaagatcatattcgccggcaaccggtgcttcatccggtaatcccaatgcttgacgacggaatgcttccagttcctttacatccgacggaggcatcttgccaacttccgtggtaaagtagatcgcatcacaacgaccgtcaaatcccgtcaaatcatgcagcttgattacagttttcagattcttgacagacacctttccggctatctgccacatccaggcagaaccttccgcccccaacggagaggtcatctttttacctccgacagacaaactgaatttaccggggccttccccttttttccacggggaagtccagttataggtccgaacatatacataatattctcctttttcaggaaacgttacttccgtagaggcatcatcgacgggtacacccatcccatgcgccaaaaggtaaggagaccccatcaaatccataaactgctggtcaaccttccaaccacccttgttactgaaactttcggcttcaataaaaaggtctgctgctcgaaccgatccaaaactcaataatagtaataatgttataaacgttttcatgataaatatatttacattagtcaatactttcagcttccggaaaacctgatttgccaacaccctgcttcatcaaaatcctcaaatccgataaatatttctcatacacgcctctgggatccgtatgatatttcttacacaaagaggctgccattcccaccacttctcccatcataccaccagttctcataaccctcacagtacccaatgcaacatgagtcacacttatatccctacctgccatgaacaagttcccgatattccgggaatacagacagcgatatggaactgcatacggttttatctcctgtacatcgcaataagacagaaatggttcctctttcatcccctgtatcggtttgggataatgaagatcgactccccaagtcgtagtgaatgtcgcatcttcatattgaatatcattcaatatgtcttgttcccgtaaaacaagatcgcccatcagacgacgagattcacgtttcccccctatataagcaacccatgccaactttttcttggcaaattgatctttcttttcactcttgttcttcaagaaatcccaattaccgtaaactgcacgaagagcatgatcccggatatattctatttctgttatctgatcattgttcaatccggcttcccagtcccagtctccacgggttataggaatacaagttttctcatcaaaacggatagcccagggacaatccggaaaatcagaaacattacgggtatcttcagcataccattgcacggaagttcccataaccaatagatctgatgttaaaggagctctaggttcacctgtttcctctttactttctcttcccatacgataatctgctccagcaagaaaaccgacttctccatctccagtacaatcagaaaataattgagctttaaatatatattcttttcccgatattatattttttccgatgacagaaactatcttatttccattttttttaacatcaactacctgtgtatttagaaataaattcaaattttcctgattctgtaacaaagcaagtttcttttcatcctcataattagatgcaggtcctgcattatgaattgtcttttccggatactgatgtaatattttcataatctgccgactcctgactgacgaagaatcccgttttgcttcccaattattccaatgcccgacaggaccaagttcatccacaagatttcccaaattcggatatggttgctgagcgatcaatccggaaagtccgacacgaacctccgaactattatttcctcccagaaccggacgattctggatcaaagcgactttacatccaagacgggctgcgctgagggctgtacaacatcccgcaatgcctccaccgacaacaaccaaatcaaactctcccgcatcttccggattttcaggtaatcccaacatattccgacgaaaaacagtcaattcttctttcccatcaggaggaagcatctccaatgccgaggtaaaaaaaatagcatcgcaacgaccatcaaaacctgtcagatcacgtagttcaacccggttttcaccagttttcaaacaaatcgttccaccatcctgccaatgccattccgctctctccgtgccaaacgtcacctccaacgcttttccattcagcaatagctcaaaacgtccgggagaagccgtttgatcccattgcttcacccaatctctggttctaacccacacacggtattttcctccattttcaacgcggatcacagtcgaagcattttcaaccggaacccctaatccatgtgccaacaaataaggagaccccatttgtcccatagactgattatccaaaacccatcctcctttacaatcaaaactttccgcttcaacaaatatgttatccgctttcagaggaaaagaaatgatcaacaatataataaaccaccattgtttcataaaaatcaatatttataaattatgaaaaagcattcctatattacaaaatcagttgtccttcctctttcaatcttttcctcaaataagaagtatcaatcttatggacatcgtttcttgtttgcttgattgcatgcgcggcagccattccagctgcttctcctgtcactaaacaacaaggcatcacacgggtactgccaaaagcttgttcatctgtcgatatacaacgaccggcagtcaacaaattcttaattcctttaggagtcagacaacggtacggaataccgtgagattcaccttttttataatgctcaggtttatgttttccgctatggacatctatgtaatagcagttacgcccgatctcatcttcaaaagatttccgctgtctccaatcttctaccgtaaaaatataatcgccctctatccgacgactgtccctaactccaagcagtgaagccgttttcacgacaaaagcattggaaaaggtagacggccggacatctttcatggcttccagatactgaacagctttctgccgtcccaaaatcattgcttcagaaatagcccaaggatctgtcgtgtcaaccgtcatatgtcccgcattacattgaatgacatccggaccgaccagattattacaaaaatgagtatctaccaaaggatattttcccgaccggaccgctttataaagcggtgtgctttcatctttccaaacataaagtgtcggaccatttatataatcataagaatcgatgtttgcaaaagaaaagcataaactggacatctgtactgaaccctcctcatcatacccacgcttgaaagatgctccggaccaagcagctaaatctccgtctcctgtcgcatctatatatactttacctttaaaagcccccaaacctgccttgttcgaaacaatgatcgcatcaatagtatcatccgacgacatctcgaccgccgctaaccgagaaaagaacaatactttagctccagattccgttaccatccgatcataaatggacatcagatattcaggattgatactcacccaatccaatttattttcaggttcatgaggcacccccttcttcgattctctaaaaattttctcagcaagtcctttatatataatcttttcaccatcggaaaacggacaccaagcaggaaccattccggctgtccccattcctcccaactgtcccatcgcttctattagtaaagtctttgctccttcacgagccgcagcaatagccgccgtacatccagccggaccacctccaacaatgattacatcccattgatcgtccacctttatttgggaacgtttcaatgtcagacctttctctcgttcttccgaagccgactgtattacccccggcatagcagccatcgccatcaccgctgcggcttgtttaacaaagtttcttctgttagtcataataattgctttttttagaaaaagaaaggcattttattttttaatatataaaatgccttctacaacttatctgttatatttaataattcggattctgtttcatattggtatttatctgaatttcagttgttggtataggccataaatattgacgatcatcccactttttctctgcaatagaagcaattttacctgcagcttctaatttagaaaaatcagccaaaccattttcatcaatatccggggcaaaaggccaaaaccaataaccttgactaacaaccttttctattaataatgaggccggatacaacatcatataaaccttcttactcattactttgtccatcaacttccaacgcatcaaatccatataacgcagcccttcattagcaaactccatacgtctttccatgcgtaattgacttcttaatgtttgctgatccatagatgtaaaagccggatactgatccacagctgatttatcgacgccataagctcttgcacgcacctcattcatagcatccaaaacagactgatctatctgatttaattcaatttttgcttctgcatacattaacagaacatcagcataacgcataatgattttatctggatcaatcttgtttgcattttccaaacatgtttcatccatacctttcttccaaaccaatccattataagaagcatactgagcaacagcacgagtatcattattcttaatcatctgtcctgtcttataattcataacctccaatgcttctggatgtggattaaattcaatacccataaaattctctccaaacgggacaattgtcatgctcaaacgtggatcacgattcttaaaggggtcatgtggatcaaacaaaggagattcgtcaatcggaagtccatctgtgcaaacatacgaagcaaacaaatcccaagtcggattcggaaccgcatatcctccatgatttctcggcagccaaccgtgtacatccatcacaagattatattctattgatcgtggaattaaaaaaatagattcttctgcattcttggttgtagtcaaaaacagatcaccataatctttatgcaaagaataaacattcaaatccataacagccttagtcgctgcaacaaccacatcataatcacccatataaagagcataacgggctttcatagccaaagcagctccctttgtggctcttttaatacctgaatatgttgttggcaaggcatttgcagctgcatcaaattcgtcataaacaaactgtttcacagttgctaaatccgtacgtcccattgacatacctttatcaatatcaacatcatctaccactaatggaacatcaccatatttagaagacatttttgcatacgcacatgctctatgaaaacgagcctcagcaacataagcattaattttcgactccattgcaccagcttcaatagctcgatccgcctttaatataatactgttagcacgtgatacaaccttatactgcttggaccacaaatcttttaccttatctgtttgcccattcaatgttgcattttgaaaaggtgtcaaattttcacgataaatcttatcgtcagaccaatcggtattaccttcttcatccaacggccaaaatgtatctctatacaattcattaacagccatttctatttcagtttcatttgaataccaattttcagttgaaccattagacaagggatttaaatccaaatcatggcatgcagaaaacaatgttactccactgaataaataaactataatattatttcgtttcataatctttcctttttaaaagttaaccgatacccctaacaacaccgatgtggtaataggataaccagtagtactgacttccggatcccatccatgcggatacttgcttaaacagaataaatcgttaccagatacatagaacctaacagattccatacttattttctttgtcaatacagaaggaagtgtgtatcctaatgttaagtttttcattcttaaatatctcccattaaacatccagaaatcagacatcgccatattagaatcaatattattacgggtcaaacgaggatatattgctttcgcattttcagcatcagtattgttcacactccaataattaccttccaaaatagaagggaagccacaccagttatttctcaatccttctatcatattactattaatacgaacattttgacttcccacaccttggaacatcatagccaaatcaaagcctttatatgatgcagcaaagttgacaccaaatgtataacggggtaatgatcctcctaaacagacacggtcatattccgaagaaattttaccatcaggtacaccatccggaccagaaatatctttatacttgatatcaccaacttttacattattattcaatttaggcgaattatcaacatcttcttgagtcaaaaagagtccatcactcaaatagccataccactcattgaactcactacctttcattttcactttctcacctaaaaattccgtacctcctaaatcacccatctttgaaacgaagtcagaaaggttggcagaaacagaataattaaaatctcccacttggtctcgccatcccaattcaatatcataccctgtagtttccatattcccagtattcacaaacggattatcatatcctataaatttaggaatttccaaagccaacaaaatgtctttcgttttctttttatagaaatcgaaattaaaatgcaaacggctatccaagaaatttgcatccaaaccaatgtcccaagtctctgttgtttcccaagaaatattacgaaccgcataatattgctgagcagcagtcagtaaagaactcactgagtttccattgtaaaatagaccagaaccaaagtttaaagctgactgatatggataataattttgtttattattatcatcaattcgtgtaatacgttcattacctaatgtaccccaagaacctcttaatttcaaatatgacaaccaattccaatttaaattttgcataaacttctcttcactcataacccaaccagcagaaaaagaagggaaatttgcccatctactatccggagcaaaacgagaagagccatcacgacggaaatttacctgcaataaataacgattggcataactataagtgattcgtccaaagaaagaacgataagcgtactcttctgcattaccaccattatctctcaaattttcaggtcccaaatctaaataggggaaatttgtcaattcatactgatcacgagatgcactcaaattttcccaaaaagcataataatcttcataaccaatcattgctgaaagatcatggcgaccaaacgatttattgtaatttgcaaaaaattgtgtagtcacatcataatcatcatttctattttcagtcaattttgtcgttctataaccagccatataacctttcactgtagtaggatcattggcataggtataaggtacttgttttacaaaacttttcaccttattaaaattatatgtcggtgctataactcctgatattttcaatccttcaatcggagttatatcaatagccgccttaccccctaaacgattataccatgaagtttttaacccaccatctgttatcattgccaatggattttctccatcttttacatctccccacaatccattactccaacgaactgcataaattggagctgttgcacgaaaattcaattgcatcggattcgtatgcggttcttccgattttgaacgtttataatttacatccaaatgagcttcaagccatttatttattttaaagtcattattgatacgaatcatataacgctcatatcctctattttcataaagaccatctgtcttgtcatatcggaaagaagctttcgttttcacaactttgctacctcctgcaatattaatcgaatgagtctgacgtggagcagaacttttcaaaattgcatcctgccaatccactataggataagcatctggatttgttgcattatttttcacccaattattcacttggtcttcagaataagcctgataccaaccacctgaattattatcattaaaacgcgtttcatttatcatttccaaatatcgctgagcaccaacatattctggtaatttagtcggcatttcccaaccatattcgaaattatagtttagggataaatcatcctgttttgcacgttttgtcgtgattacaatcacaccagctgcagcacgtgaaccataaattgaagcagatgccgcatctttcaaaacggacatactctctacatcttctggattcacttgattaatatcccctggaattccatctacaatcactaaagggcttgtctcaccgatagtcgtcacacctcgaatttgtatactagcagttgctccaggagcactattatcacgtgttactgtgacaccagaagcagcaccttgtaaggctgtagataattgagtcgttttgcgggcagccaaatcatcacctttaacagcagcaacagcacctgtcaaatcttttttcttcatggttccataaccgacaacaaccacttcatccaacatttcagaatcttctttcaaactgatcgccaaatctgttttattgccaacaactatttcgcttgtagtatatcctatataagaaactactaatgttgcaccaggtgcaacattaagggagaacctcccttcgatatcggtaacggtaccgtttgtcgtacctttttcaacaacgtttgcaccaataattggttcaccgtttacatctttaataataccggtaatcgctttttgattctgttgtacactgggcacggaagaaacagaggacgaagctgtctttatcaatacttgtcgatctataatttgataatcgtaaccggtatttttcagtacttgagccagcgcttcatccaaagtcgcatcttttacgttgatgctcgcctttttatttacattcactttgttgtcattgaaaaagaatgtaaattcactatttttttcaatgtctttcaaaatctcaatgatactgctattctgcttattcatggataatttataaccctgcgcgtaagttgaagcagatatacagcaagcgactcctaaagaaaataaggtcgtgagtttcatgatacgcttagttttttttaataatgggacacaaagtgcccgttcattactttttttcataactttgtaatgtttttgatgaatattagcatgcccattccacggtttgaatatttaagtatggacatgtagtcgaaatctcgaattggagggtgtttgccgacatcctccaattttttaggttaacaaatctcctttctcataggcatttttcagattttaatattatactattactttaaaattaattttttataataaatacacataaaaaatctttttcccctattcttattgcaataaattaaaaaaaaaattattgcaagttcatgactaacgggtcaaactataattaccatcctctatttctttatattttaatggagaagacagttgaatcaacatcagtatcttttccagcgactcatccctcaccttgaaagtaaaccgatatttatctgccagatccttttggcacattacctttctgccgtaccactgttcgagacgtgggatgatcatggaaagtttttcattttcgaaactcagtatcttttgtttgcgccaagcggtgtatttgtcggcatccacaatctgtttggaaatcttgccggtttgccggtccaccaagatcttttcgtcgggagagacgaagtattctttcatttggtttgtttccttattctccacacttactttgatcttgccattcaggagaatcgcttccatcttattttccatgttgtaactgaacaattcgaacgcagtccccaacgcctccacactcatatcctccgtatgaacaataaaaggtttttcgcgattcttcgccacatcgaaaaaggcttgcccgtccaatcttatctcacgcgtcttaccggaaaaactggcaggataggttaagcggctacccggtcccatctgcactttcgttccatctggtaaagagacagattccatattttggataccggaacttacaacatacattgggacattcgccttgtcctgcaacgcaaaataaacagtccctgccacacccaataccaataagatggaggcgaccatactatatatcttataaaatacaacattccgtccttcatcatgttgccagacttccttacaaatattccgccagatagacggctcgtccggacgatcgctttccactgcatccggagcattattccattgccgctccatttcttttgtcacccggcgagaagattgcaaagctatgcgctcttcttcggtcagcgcatcttgcattagtttctttagtatatattttttgtctttgtattccatttcaattgctttacatatataaatacacacaagttacttctttcccctacccagtccgggaaaaaacagattattttagcacctgacagtacaaatttccaaaaaaatatgacaatatcccctctaaaaactaacatctcaactaataaactgatttttagcaaaatgcaacgacaaccagtttattaaaaaatattacccttgcgggtaatttgaattagaaggggtagaaaatcgaattagatgcggtaatagtttcgatttgaacccatcacttttttagatattagataaatgataataagagataggagacagaatacattcaatcagataaagagaagaagcaatgtgatattcttcttcaagtacttgagagcttcgctgatttgattttcgactgttttctctgaaatattcaataggagagctatttctttgtaactcttttgctccttacggctcaagttgaaaatctcacggcgacgcggtggcaattcgtcgatcaggcggtctatatattcttggagattatgagcatcaatttcttcttccacatcatacggttcttccaatgcggcaaggaccgtgactttgtagaaatcttcattcacatttttgcgatgccggttaaagatcagattccgggtgataataaacagcaaacctttaaaatgatcgtcctcacgaagaaattcacgcgtttcccatattttgataaagacttcctgtactacttcttcggcagcatcggcactggtcaaatagaggcgactgaaattatagacctgtttccagtattgcttatacagagcagtaaatgcgtctttgctgccctgcttcaataataatatcagttcccactcttccatattattttaaataagatacaaatgtaacaaataaattgagaattgaaacttgaaaattcggaagtgctttcttcttcatttttcattttcaattcttaatttatttagtggttcgttccttcaaacaaatcatgatcttcctttttctgagagctcttggccttgaagttattgaacgtataactgagcgtaagcgtaatgagcggatagctgggacgaatccgtgtgatggattgcaagtcggatgtgatgatcttacttacataccgggcagaattgaaaacatcccggaaagaaagcgtagccgacaaccgacggctcatcaactgctgacgaacagcgagattcacgtaccagaaagcatccgtacgcccctgggtcgtaacggacggaccgacaaaattgccgtccacctggatacgggtatacttaaaaacatcgaaagaattgttccacatgacatcgtagttcgtacttgtctcattttcaccaccggttttatactgattcttcaccttataatgatacaggctgccgttcaggttcatattccaccaacgggtaagttgtacctgtccgctcaattcgacaccggtcgaatagtcgtgtccaacattcgccatcgaatccagtgtcacacctgcttcataagggacgcgcaaacgttcgatcttatccttacggctccggtggaataccgtagctgaaaccgtatgctcaccgatattcttcttataattcagctcgaaagaattgatatattccgaacggatatccggattaccgatctcggccgaataaaaatcccgataggtgatatacggctccatgaaaaagagttccggacgagtgatacggcgcgaataagaaaccaatagcttatgttccttcggaaacgtatagcctaaatgaagggaagggaaaaactcgaacttattatatgtacgatccttgcccggaatcgagcttcgcaaaacacgatgcgtatgctctccccgcacacccgcctgaaaatcgaatgatttatagctgtcggcaacgattgcataaaccgaattgatgccatgctggaaatagaatgtgttatagatatcgtcccggttataaaactctttctttaccgggtcccagaaatgcatcgtgtagtcgccgtcttccaaataagagaaatattggtaaccgccttcgatccgtcccgtcttgctgtaaggataaatatagtccaggttaccccgtatcgtccagcgatgctcatcttcccaagcacgatgtcccttttcacgttcgttattcttattaaaaaggtcactctggaaatattccatcgcattacctccgtatttcagatagaaactgcccatcaactgatgccccttatcgtcgaatttatgatcgaaaccgattgttccctggaaataggtttcatgcagatcgtaatcgtcacgactataataatcgccttcaccgaaagtagccccgtctgccaggcgtttttccttataatccagatcaccgttgcgcgtacgcccgccataaccgccttcaaagtcggcattcaacgtcgtatggggcaatgtgtacatccaccccgccttcatcgaatagttgaaattgttgcttttacgcggtccgttggaatgggaggtcgttgccgtgtctgagataatagtcgttttctcctgatcgaaatcgctcttgcgcagacgatcactccacacaccgcccaaataccaacgcgatgccttgttctgctgagacaccagaaaatccaccccgcgcgaaaggaccgtgcttcccgtcaggttcaccataccgctaaaaccatgctgggcgtgtttctttgttacgatattgatgatccctacatctcctcccgtatcgtgacgggccgaaggggtggtgatgatttctatattttcgatatgccctgcagggatctgctccaaagcctgcgtaccgctgaacacgctcggtttgccatctacatagaccgtgaaaccggtacttccacgaaaactgacttcaccttcggcatccacacgtatggagggtgtattctccaggatatcgacagccgatccgcctccggcaagcaagtttgaagaggcttcgatcactttcttgtccaatttataaatcacttgctttttctgtgctacgacttcgacttccgctaatcccacctccaaaggtttcatcgcaatcgttcccaaatctaccgctttcgaaaccgcatccaaaacaataccgggacggttatacagatcgtaaccgaccaggcgcaccaaaaggttatactttccatctttcacatcggctatgcgaaacgtaccgtcacgatcgggtaaagcatgaaacactggattaacatctccttcacgaaaaaggaggacatcagcaaaatcaatcggttggttgttattggcatcgactattttcccttttatacggaaaccaggggccgccacggccgaatagctaatacacaataaggtcaacaagagacaaaaacacttcttcatttcctacattggtttgttaacaacgccacgaagataggattttcgtacgaaagaaatcgtatatttgcatatataaatcaccatttagcatggcatcagcgagaaaaatcatcatcattggagcaacttcaggcatcggatacgagatcactcaactgtaccgcaagcagggatggaggatcgggattgccggacggcggacggaattgctcgcaaaaatccggtcagaagcacctgaccagatcgaaacggcacaaatagacgtaacttgcccggacgccccggaaaagttagcggaattaatcgatagagtcggcggaatggatgtattcttgcttagttccggaatcggtagccagaaccggaacctaaattccgatattgaattgtctaccgtccaaacaaatacagtcggtttcacccaaatggtcatttccgcatacgattacttcaaagaacatggcggcggccaattagccgtgatcagttccatcgccgggacaaagggattgggagccgctccctcctattccgcaaccaagcgctaccagaatacttatatcgaagcactcgaccaactggcacagatggaaaaactcccgatcgtattcacggatatccgccccggatttgtaaagaccgatctgttgaaaaacgataaatacccgatgctgatgtccccgcaatatgttgcccgaaaaatagtaaaggcgatcgaacggaagaaacgacgcaccgtaatcgactggagatatgccgttttagtatttttctggaagttgattcccagcttcgtatggaggcggttgcccattcacaattagcatttgtatatcatcctggcaatccctacctttgtgcccaaatttataactatgcacaaataaacgatgggattattcattaaaaagcctttggaggccctgcaggccgaagccaatcaaacaggaagtaaatcattaaaacgagtattaggcccttggagcctggtcgcactcggcgtcggggttattatcggagccggccttttctccataaccggaacagtcgccgccggatatacaggaccggccattacactttcatttgccattgcagcaatcggatgttgctttgccggactttgttatgcagagtttgcttcgatgatcccggttgccggaagtgcctatacatactcatacgcgacgatgggcgaactgatcgcttggattatcggttgggatctggtactggaatatacagttgccgcgacaacggtcagcatcagttggagccgttatctcgtcgtctttttggaagggctcgggatcaaccttccgacagcattcactgcctgtccctgggatggagggattgtcaatatcccagcattcctgatcgttgtcctgatgagcctctttctgatccgcgggacggaagggagctctatctttaacggaatcattgtcttcctgaaagtgtcggtcgtcctgatattcgtctttttaggatggaaatatatcaatacggacaattacataccttatattccggcaaacaccggcacattaggcgaatacgggctatcgggtgtcctacgcggagcggccatcgtattcttcgctttcttaggtttcgatgctgtcagtacggctgcccaggaagccaagaaccccaaaagagatatgccgatcggaatcctcgtctcattgctcgtttgtaccatattatacatgctgttcgcccacgtcatgacgggcgtagcccattattccgaatttggcggccaacagggaatcgctcccgtggcaattgcgatcgaacatatgggagaagtagatgcttcgggcgtgcttcatccggattacccttggatgaacaaggcaatcgtccttgccatcctattcggatattgctcggtcatcatggtgacgctgttagggcagagccgcgttttcctcagcatgagccacgacggtctattacctccgttcttttcacatatcaatgaaaagttcagaacacccgcccgcagcaatctgctgttcatggtgctcgtcggtctgctggcagctttcgttccggcacgcctggccggtgaaatgaccagtatcggaacccttttcgccttcaccctggtttgtgccggtgtgcttgtggtcagaaagacaatgcccgatgtgcatcgcgccttcaagactccgttggttccgttcgttccggttgccgggatcatcacttgcctgtgcatgatgcttttcctaccggccgacacttggatacggctggtgctatggatgctgatcgggctggatatttatgcgtgctacggcatcaagcatagcaaactggaatacaatcaggcgaaccgccacggtcagctggctctgaatatgatcgggatcgtccttgccatcctttgtgtgatcacgggactctggcatcagcaaaccgttggttgggaagaaagtaaagtcctgctgatcatctcttttgttttcgcttttacgcatctgggcttttacatggtccggatatggaaacaaacaacaaaggttttttaatcattttttatacgaacccgaacagacgttgtttgtataataacaaaaagataattaaatttgcagaaatggttctacagtgtagaacttacattaatcaaacaaactattcctaagtttaaggtattagtctacttcagtttgttttcatatgaactgatttggtataacctcatctacatgtgaatgtggatgaggttttttcatcataatctgtgaaccaccttcaccgatcacggaatagtgaagcccaatcggctgcttgaataaaaaaagtccatataaccagcttttgaagctaactatatggactatctgtatgtacgcaggatgagacttgaactcacacgccgtaaccggcactaccccctcaaagtagcgtgtctaccaattccaccacctgcgcgagaaaaggtgcccagaacaggactcgaacctgcatgcctctcgacacacgcacctgaaacgtgcgcgtctaccaattccgccacctgggcctttcttcagtacattaaaaaagcggcctcataccgcgtctgttaccgattggagcggaagacgggactcgaacccgcgaccctaaccttggcaaggttatgctctaccaactgagctacttccgcgataacgggtgcaaagatagaggtatttttttattttccaaaacctgactgcacttttttgcactatttttacagcctgcacccgctcaaaatcatatcttactttaatccagtcgcttccatccacatgtttgccatcagttggcgaccgggtaaatcgggatgcacaccgtcattcgaccaataacgtgccggagccagcttcaccgctgcatcgaaacccgactggaaggggacgaatatggtattgaattcttccgacagtttacgggcagacttgcggaattcatcgaacatcggataccatttggaatcttctatagccgccccgtcacgcaaagtgaagggttcgcaaaggactatttgcgtattcgggagtttctctttcgtatatttcaacaaagcacgcagatcgttttcgtatgtctcgaccgttcctttataaccatgcgtcaacgtatgccaataatcattcacaccgatcaggatgctcaggacatccggctggaaagcaaggcagtcgatctcccagcgttcacgaagttgatagactttattgccgctgatgccgcgattgtaaatcttcggctgcaaagccgctttcccctccaacaactgcgtagcggtaaagagcacatagccactaccgaattgttccatcgtattgcaacggttactattcctgtcgcgaccgcagtccgtgatggaatctccctggaacaggatcacacaatcctttttcagattaatcttcggagcatgtacggatgtattttctttaacagcggcttttgcgatctccgggatcatcaggacactgaaccctgccaacgctccctttttaaggaagtctcttctggaattcttcatgggtagaaataagtttattttattacattgattgaattgaatacaaagatagaaactttacaaaaaaacgtatctttgtttcttcatattttcaaaaagaataatttgccatgtttagtaaaatagtagcgatagagccggtcagtttgatcccgtctgcagaagaagcattgcacacgtttgcaaatgaagtagtgatgtaccccgatattccggcggatgacgaggagatcgtccgtcgcatcggcgatgccgacgcggtgctgctgagttatacttcaagtatccgccgcgaggtaatggaaagatgtcccaatatcaaatatatcggcatgtgctgttcgctttactcaccggaaagcgccaacgtcgatatcatttatgccaacgagcacggtatcaaggtcacaggtatccgggattatggagatgaaggagtagtcgaatatgtcatcagcgaactggtacgctgcttccacgggttcggccagccggcctgggaaggcgaggttcgtgagattaccgggctgaaagccggtatcatcggtttgggcaagtcaggcggcatgattgccgatgcactccggttcttcggtgcggaaatatcttattttgctcgcagcgaaaaggaatgggctcgtgagaaagggtaccgtttccttcccttagaccaactgcttgagcaaagcgaagccgtcttctgttgcctgaacaaaaacaccgttctgctgcacgaggccgaattccggaagttgggtgataagaagatactgttcaacacaggactgtctcccgcctgggacgaggaaccgttcgtcaaatggttatcgggcaataacctttgtttttgcgataccgtcggcgccttgggcggcgctcaccttttggagcatccgcatgtacgatgtgtacaggcctcgacaggccgcacccgccaagcgttcgaccgtctgagcgaaaaggtactggccaatctttcagaatacaacgggtgaaacgatattaagcagggtgttcacaaccgaccatcctgctatctcggccgtcgcactgtacacatccacgacggcatgtacctggtcgttcctgatctccacccgctgggtgtcccccttaaatccgggagtcgactgtatggtcacctgcatggcttccggaccgacagaggcacgtgaggcggctaccgtgacattcactttcgtagggaacaggcggatggcttccaccgcattgccggtaaacacgactttctgttctttctgcaaagcctcctcatagaccggtgttccttttaaggcatcaggtcccttttcattgtagaaacgggcagtcgccttccccatcaaggctgctgtgcgcaagacatcgaaccctccggtagctcccgaagcgatatagatacgtgtcccgttctccttggccgtttcgcatactttccggtaaaacgcatcatcggccagcgcaccgatcgaaagggtcacgatagaagtcccgttcttcaacgccggaacggcgaactcccgaagagcggccggagaagccgtctccaccagtatatcgggtttcaaggccagcaactcatccgccgtagtacagacggcacagcttttccctgcctctgccatccgaccggcaatacgttccgccttggctaccgtacgcgaatagactcccaccaactcatattcgggcaacaaccctttgacgacagcttccgaaacgattccggcaagccgtccgcatcctgctattacaaatgttttcatgcttacaaaagtacataaatacttccgatttccatgcttgagcatgaaagaaaaaggggaacaaactactcaaacacaacaaagcaatcattaaaattgatagccaccttctcgaactgattaacaagtgccatgcctatattgcctgcgtatggcacaagtttatcgccttcaatcgtcactaccatatctcggaattccaagctccttccaccaaaagagagcgcccatacaggcagaaccagcacatcggctgccacagcataattaccccgtctagcctctgcggcagacctgaccatcaacatcgacgtgatgttatccagtccaagctcttcctgatgataccgcaacaacgaatccacacatgagagtgccccaaaaaactctgataatccaactcttttccatcttgaaaatgtcttttatatatgattatagcaaatataggggaaacgtaaatcgtaagggactgtttgcgttaaaaaacaggaattccactggattataatcagaaacagtgcataaaatctcctcaaacaaggcagataaacagctctacatccccgttccggtttcacgtagacccgggtctccacctcctccacacccggatctcccatacccttccacccgggtctgaagaaacttttcaagttgttttcaccaaaaaagtagcttgtcttcatgaaaaaacgagcctttttatgctgttttgtgtcaacttcgggacacatcatgaatttgatagaaggctgatatataataatttattgcttttccccatgatggttatgtaagcgtctccgcgatgctaccattgttcttcaaacaagagtatttagctttgtcatcaaaaaaagatgaaagcagaaactcgttttccccgtacagtagaagcctacaaggcacatttgcatgaagatcgccctcattacgacagttttcaaaccttttgccgtaaacaaggggtacgttataaaggagtgatgcaatggatgcatcgtcataatcgaagcgtaggaagtttacgtttggaagtattattggaaaaaaacggtaatgacagtaacttgaaaagttcacttatagaagtgtcagggcaaagctttccgatcaagaactcctgcatatcctcacgcaatattcctttggaccaatatatcaaaggtgcgatcctctctttccctgacggtgtatccattagtatccgcgagaccaccccttcggccttaatgaagctttttgaattatacacccaagtaacaggcaatccaaatgtttagtctgaacgaatccctgcattattatctttacccttactatatcaatatggggtgtggaatagagattttatccgaactggttcgcaatacaaagacaggaaacccactcagcggagatgtctatttgttctgtggtaaaaaacgggacatgatcaaactgttgcgctggcaggaagacggatttattttatatcagaagcgtttagaggacgggacctttgaactcccccgttttaatccccgtgaggactggaataagatcgaatggaaaacgttcatgatgatcatgtcaggcatctctctgaattcagtgaagtacaggaaacgccttcgtttgtagtccggtctattgatttgtagggcgccgctttataaataaaagcataaatattttgccgccggaagaactatccgtatctttaaggcatggattacaagcggattgccctcttattggaagaccagttgaaattggctgcgcagcgggaagaggagttgttgaaagtgatcgcagatcagaatgaacagctcaatatcctgactgcggaagtcaaatccttaaacagttccatcctctcgttggagaaagccctgttggaaaagaatgcatcccttgaaggccggcaaagtaaagtccgcatattgggaaagatggtatcgggcaagaaatccgaacaggtctctgtccccgataaaggaacgacaatcatagccaaagtaaaacccaatctgaaagaaagagggaacaacggagccagacgcaaagaatattttaatctggaaacctgccatcatgatatctatccggatgcagcagagttcaaagtggaagaaggcaaaaaaatacgtacgacagattgcatccgctacgaatttattcctccccgttttatcaagcatatctatcaccagcactattatgcctgtaaaggcactgtttatgccggaagtctgccagctgtccccttgttgaactctaattatgatgcatccttcatcgccggtatcctgcagttgcgctatatctactccatgccagtcgaacgtatcatcaaactcttcgcagagcatggctttgagatgaataaagccacggctcatggactgattaaaaaagcggccggtctgtttgacctggttgaagatgttctcaaagagactgtcctctcggacaattatctgagtatggacgagagctattataccgttcttaccagtgatacaaacaactcatccggcaaatccacagccaaaggatatatttgggcagcactggctaatcatctaaaactggtacatttcttttacgaaaacggttcacgttccagaaaggtcctgaccggttatctcagggaagactaccggggagctatacaaagtgacggattaggaaattacaagataatagaaaaagaggcctatccggatgccatccgcctatcctgtttccaacattgcaaacgcaagttcctgaatataacaggaaacaaggatgctgaaaaaatcgtacgaatcatcaatcgcctttaccaaaatgagcaccgcattcccccggactggacagcccgccagatactggactatagaaataaatatgctccccctatcctcaaagaattaaaagaggaactgataaatataaaaaacaaaaagtcgactttacccaaaagtgaattaagtaaggcgattaactatacgttaaacgaatatgatgctttatgcaattatatccgcagtgcagactatgctccggacaataatgcgattgaaagactaatgcgatatattagcttaagccgcagaaactccttattctgtgggagtcatcagggggctaaaagggctgcactgatctactcactggcttgttcgtgcaggctcaacaacattaactcatttgagtattttaaagatttgcttactaagctcattgatataaatcccaatacagatcacgagactataagaaatttactcccccataaatggcaaaggtagcatcgcggagacgattactttaagaccaaacaacccaagtcttaacacaaaacaaactgcttctttttcttccgccaaatgtcgaacaagtgtctgacatttgtaaaacgcttgttagactattgagaaacaagcgttttacaactgtgggacaagaacgatcatattacttacgaaataaaagactatgagacaaggcagtagaaacgtgtaatccgtcgtaggccagatggacatgaggcggcaactccttctctacctccgcatgcaaaccaatgcgatgactcatgtggatcagataggtttccttcggttttatcctttcgatattagcaagggcttcttccagcgattcatgcgtagggtgggctcctcggcggagagctgtcagaatcagcacatccaggccttccagattggcatactcttcttccggaagatattttacatctgtcaagtaagccatattaccgatacgatagccgaaaatcggcagtttcccgtgcatcacccggatcggcgtaaccgggattccggcaaccacaaaaggctcgtttccgacccggtgaagttccaggttcggaactccgggatatttatgggcacggaacacataagggatacgtgtctcgatagcttccgccacattatcttccgcatatacatccactcccttttcacggcaaaaagggcgtaggtcgtccaatccgccgacatgatcgtaatgttcatgtgaaatcaggaccgcatccaaacgatacgtcttgttgcggatcacctgccaacggaaatccggaccacaatccaacaaaatccgcttaccatccgtctccaccagcacggacgtacgcagacgccaatcccgtttatccgaactggtacacacctcacactgacaacctatttcgggaactccggtagaagtccccgtccctaaaaacgttatttccatttatcctacatattttacctcaggcataatctcgataccgaaccggtcatgaacagccgtacgaatactttcggcaaccagtgcgatctcgtgtcctttggcttcacccaaattgaccaataccaatgcctgcttttcatatacgccgaccgcaccatgcgacttgcctttaaaaccgcactgctcgatcaaccagcctgcagggaccttcaccttcccctctcctgccggataggacggcatgtccggatattgcctcttcaacttttcgtaatggacaaccggaataaccgggttcataaagaaacttccggcatttcccaactcatcgggatcaggcaatttttgatgacggatcgagatcacggcatcccgcacagcttgtagcgttatctctggatatttagccagttcctctttcaaattgccgtaattgacagaaaaccgaggctttttgctcaaacgtatatttacataagtaacaatgtgcgggtcgttatgctcattcttgaagaaactgtcccgataactataaagacattcttcatttgtaaacatacgtttctcgaacgaaagctggttatatgtctccaccgtctcgaccacatccttgatttccgtaccgtatgccccaatattctggacagcggctgctccgacttcgcccggaatgccggacaggttttctatccctccccaacctttggagacggcataagcgactacgtcgtcccacttctcggcagccccgatgcgaagcaataccgaatcgtccgtctcttccgcaacagagataccttttatctgcgaatgcaagataaccccgttaaaatcatttataaacaacagattactgccacttccgatatgcaacgacaaacattcctgaaaatattcgtcccggaagatccgccccagttcttcttcattcgtatattccataaaccaacgggccttcaccggaaggtgaaaagtattatgtttctccagcgagtaattctcttctattctcatttcgcgtatgttttattttgcaggacaaaagtaacgataaatatcaaatcaatcagcaggtatataaaaaagcctttcaaatatagcggccaaaggttatttaacattttttgtttcgcaaatcgtaacaaatgcatatacgtgttgttaaataagaaatgaacgctgatttctttatatgcaaaaagagatacaacatatcaatgaaaagcgtacatttgccttgaatatcattaattaaataaaaacattcatgaacaaagcagaattgattgaggccttggcccagagatcgggattacagaaacaaaaagcgaagaaactattggaggcttatgtagacatcgtaacagaagctatgtcccacaacgaagagatcgtattgatcggtttcggaacattgataccacgtcctcagacagagcgtttagctcgtaaccccaagacaggaacaccggttatgattccagccagaacgactgtaaaattcaaaccgggtaaatatttgctggatgcaattaacaaacccgaagaaaagaagtaagactttttacctgacaaagggaggcaatctgaaaaaggttgccttcttttttgcgacctgtccaaattatgagtaatttcggcgccggaaaaatgacaattcaatcatgaaaatagttaatcttggagaatcaaactcggtgttaaaccggtttgtcgcagaactgcgcgacgtcaatatacaaaaagacagtatgcgcttccgtcgtaacatcgagcggatcggtgaaatcatggcttacgagatcagtaaggatttcacctacagcaaaaaaggtattcaatctcctctcgggatagcaccaatgaacactcccgacgattcagtcgtcatcagtacgatcctgcgtgccggcctcccctaccatcagggtttcctcagttacctggataatgcggaaaatgcatttgtttccgcttacaggaaatacaaggaccgtctgaacttcgatattcatatcgaatacatcgcatctccccgattaacagacaagacattgattataacggatccgatgttggcaaccggcagttctatggaactggcctacgaagcattgcgcaccaaaggccacccggcgcatatccatgtcgcttccatcattgccagcaagcaggcaatcgaatatctccagcgtaaaatgccggacgacatcacgactatatgggtcgcggctgtcgatgacgaactagatgatcattcttacatcgttccgggactgggagacgccggcgatttgtcctatggtgaaaaagaataagatatgaatctaacggggtaaagtaaaccagaaacgggaccccttccctatctcggactctaccccgattttaccgccaacctgttctattatgctcttacagatcgagagccccaaacctgtcccctgcttgaaactgtttcctttatagaaacggtcgaacacatgtcgctgcacttccggcgacataccgtcaccggtatccgtcacagaaaactcaatctcatcccagcgtatctcgtaaccaagcaggatcgttcctttgctggtgtgtttgatggcattattaataaagttggatatgatctgtgtcagcctcaccttatcacaacgcatgatataggaaggcaagtccggaaccacacagagcgcgacttcagccggtactttgatacgcatcgaaacgaccagttctttacatagctcccgcaagtcgacctcgacaagtttcaattcgattataccagattctatcttcgccagatccagcacatcggagatcaactgtaacaacagttcattgtttttttggataatctcgacaaactgcttcttttcctccggatcgtccgtatcgaccaacaacgtggaaaaaccgacaatggcattcagcggagtccggatctcatggctcatattggcaaggaatgcagatttcaaacggtcgagttcttcggctttctcacgctgcttctgcgtttccttcagttcggttatatcataattcacacagatcatttcaagtctgtccggattagtcgactgggtgttccgcattacattcacacgagtccaatgccaaccttctccatacttcacccttaattcccgccgaatactatcacactgtcctttttttacctgttcaaagaaattaaacataaccttccggtcttcaggatggatctggctataaacacctatgacttccgatagcggcacaccttctttttctcctaaattctgataccattggtcgatagcatacccttcacgagtcaacaaatcaaatttggcatatccaacttttgcaaaacggctgaccagactgaagaaatgttcaaactcctcgatacggttatatgcgaccgccttatctgtattatcaagattaataaacatataattaatcagatctccatatatgtcatacaacatgcagacttttgtgaaaatatcgatcgtaccattcttcattgtcggatagaaccctttgtcctcaattgtgttaaatgaataatccatgtgaaaagagactggctcccgactaatcagtttttctcgtatttcatcattaatcataggattttcaaagatattaagccccaaaacagactctttggaaggaaggccgaatatctcgacatccatattattcaaatccaccagatagcccttcttatcatacaactctattccgaccggtatgttggtataaatattccgaagtaacttttcactatggtccaaagcttcattggtacgggccatcttcgttattatactaatgatattggaaatagacgacaaccattgatagtcctccaagctccacatacgatacttatctactatatcgattcccatatccccccaagactcacctttgattattaatggaattaaaatcagagaacaggttcgacgcgctttcaggtagcgcttctcctcaaccgcttcaggaggtaattcatccagattattaattaggataggatataaattccgtattttatgtgtagaccaaggtaacgtagcaaccggaatgttttgcaaaaacggacggacaggctcaactccctcactacacacctcatatgtgcagccaatctgcttctcatcctcatattccataatgtatacacgccccttcgtatcgatcgaaaatagaacctccgtaagagccaaatggatcgatttatgcaaatcatttgtctggataaaagaatgtaaggcatgggacaaactccccaaatgcctgagaacactatcaacctgtccattcacgacaggtctgttctcctccatttcactaaaaggaatcaactgtaaaatacccaatacggtcaacttgccatcggaagccttttcacgtttataaatttttgtacggacgaacctataaccatagcaagtctttatagggaagatctgttcgtatataccaatacctttaaagaaagcaaattcgttagcgatacgatcccgatagtctccacggatcaacaaaaagaaatctactatggatattttcggaccatccaactccaagagactaatcaaatagtcagaacagatataacatctttcttcaaaatcagctttccaccagccaacctgagcattgtctaatattaattgatactggtctacatccatgaatacgacttctttattatccttcatacaaaagtcgttataataaactgaaccaacaaattttattccccttaatattcaaggattttccacatacattaatcataaaaaaatagcaacataagctaatttctgcttatgctgctatttaactatagataaaaaaacgttatttcaactctttaatgcgaatattacggaacttgacaggagagccatgacctaagaaaccgatatgtcctttcttattgaacaggcccggatgttccttatgatcggcagtaccgttctttgtcgcttcacggatattgccttccatgattaccaccccgttgaccgttaccttgatgttatccccattagctacaatttcttcataattccattcacccgcaggtttaaacgcactatgatgttccgccttagccgggataattccataaacggaaccgtgatgctgcaaaggagtaatatccttataaatcggatgttcgcaatccagaatctggatttccataccaacataagcggcatccccttccatcggggtacggataccgacaccgttattagcacccggcgtcaactggaattcgaaacggtacacgaagttgccatactcgtctttcgtatacaggtttccaccatagctcttgctcggtatcatggaaatgcaaccgtcttccagggtataatcaaccgtgttacctgtccattcatgcatattcgtaccgtcaaacagaaccttaaaaccttccttctcttcttcggctgaaagtttgaacggttccttgcgttcgagttcttttacataaatattccggtaataaaccttgctgccatgagcctgcaattcaatctgttcgaccgggaagatcgggagcttgcgatcccaatagttttccagaatcacatcatccaccactttctctccgttcagtacgactgtcacacggtcaccgaccatcttgatgtaaaagctgttccattcacccagcttattatcggccactttcgtcggcttgctctcgttcatctggttgttgtataatccaccggaaccgacttgcgctcctacgtttacacgcgaagtatcccatatctgcacctgaggcgtaccacgcaagtaaataccggcatccgcttcaggaccggccggatcaagcatccagtccacatacatttcaaaatcaccgtattgtttttccgtgcacagattgtcacccttgccattgaatatcagcataccgtcttccacgctccagcctttacgcatgacctcatcggctttcgcctgctctttggccaactgtcccggtttcatcttcgcacgggcaatcggattctgtaccaaacctttccagccggtcaaatccttaccgttaaacaaagaaacgaatccttcgccttgcggcatctcggccagatgtttcttgatcgcttctttttgatagccggcatccggattgtcaagcacctccattaccttattcaacaaagcacggacatttgcccccatatactccttattacccaaagcaatattcatgactgcattggcggcagcctgctgtacaggtttctgatccagaaattcaccggcatacagcatacccaagaatgttccggtattttcaatctgttgtaaaatcgcgatcttctgtgcatccgttttggcaatttccattgccttacgcaagcttaacaaacggttttcacctgtaaatgccggattggaaaccagtttcacataagtagtgagagccggatcaaaatagttggacgacgggctttccttacagatcgtatataattcgtccgccacttcaatacccttccagttcaacagggcttcgaaggctgcatcccttttgacacccgtattagaacggaaacctttcacgactgtcgccagcgcatccggttgtccggtagaagccaacaccagataatacaaataatctttattgccggcctgcaacatacgacgtgtcaccgtttcgacccggtcggcaaccggaagagaggacaatgctgaaataacagcccgctgcatgggaggaacagccaatgcgtcagccgtttccagcataccgcacatattggttatatcacgttctcccactacatccttcaaagccacataagccgcggctttcacttctggagagcctatctgtatctgatcaagtacggtattgatattggcagtagctttgcgcatggccaacaattcaagtccggctatttttcccgcattggcagcagaagagacggcctttgccactgccccgtcgatatctccggagaaggcagccaaagcatcctgtcccaacagaacgacttgcttgtcatcgctcttcagcaattcggccaacgaagggatataggacttatcgcctatcttcaccaatgtccaggttgcagcctgcttcacgtcgaagttcacatcaccgagctgctccaacaggatctgcttggcaggaagatcgaaacgaatttccagattctggataatgtcatgtttgacaggtttcttggcctcgcgtccgatccagttcaagatgtctattttcagttccggtttggctttaggaaccattttcataagttctatatacaactccttatctgcaaaaccggaagcatagctcaaagccgcattccggtagttcttgctcggatctttcatggcagcgataaccatcttagatactttggccggttcctcggctgctaaaagtatttgcaaggcagcttcccgtgtctgctcctgtccggctttagccgctgctttctgcaatttctttgcagctttcatcaccgcatcacgatcactctggaccaatcgcttcaacaaagcgatataagcttcgttggcaccagtcacttccatcgtgtaaccggcattctcggccgcttttgctaacactggcaatgaattagaacttccgacacaactcaaggcatacaatacctctttctgcatattcggatcagacgctccctgcaataccaacaaaacaggttcagccccatccacccgggcatcggcaatcgcacggatcacatccttttgtgttttagaggaaccggtacgactcttcaaagcagcaaccaatgcctgacctgctttttgactgccattagaagccagcgcacgagcggcgggaccgctcaacgactcatcgttcagataagaagccagtacatctatacattcgtctttccccaacatctgaagttggcggataataaacgcttttgtttcacgctcgttcaccatttccaaagccttcagataagcctttgcagtcactaaccgggcattctcctcccctttcgccatgacataatgcgtaagaccgctcaaagcatagtcgacatttgcattactgcctttgcccggagcatttatcatgtttaccaacatcagaacaccttcttcgccggtagaactcaaatcaccaatcaatttattgtacgccgcttgtttcgccgcaggcatctgagccaacacatcggcagcggtcgttttggccgtacggttggccggagtctgcgccatcagcatgcttccgcaaagcaacagggcagctattgaaatatatgcttttctcatattattatctatttatgtaattgtcaattgttaattatcaattgtcaattcgttatatattccagggtgctctcatcggctggtccagcaaacgatttgcagcctcgtcgtcaataaattcaagttttacaggatcgaaattcagcgtccggttcaaacgcagagccactgctcccatattgacaatagtagccgaacggaaaccattcttttcgttcagggcgaaaggctggcgtgtcttcacacattctataaagtccgtaacctgaggttcgggttcggggaaatcggcaagtttcctctcccaatcgggaatatcgcatacaaaatttttataaacattacccttcggtccggcaatatacggcgtattcggatcaccgaagtcccccccccaaaggacaatctgacaaccatcgtcatacgtgtaggtaatggaacgccaagtaccgacagcatccggatgctgttgcggggcatcaacctccactttaataggactggtatcgtctttacctagtatatattgtacggggtcgatgtaatgctgccccatgtctccgagccctccaccgtcataatcccagtatccgcggaaagtctggtgtacgcgatgcgggttataaggcttgtaaggagccgggccgagccacatgtcgtagtccaactctgccggaaccggttgcggttcgagatattcttttcctacccagaaaaacttccagttgaaaccggtatgcgcactgatcgtcaccttcaacggccatcccaacaatccgctttgcaccagcttcttcaacggtttgacaggagtgcccagtccatagaactggtctgtaaaacggaaccatgtattcaggcggaacatacgtccgtattgctgtacggcctccatcacacgctttccttcaccgatcgtacgcgtcatcggcttttcacaccagatgtctttcccggctttagcggcctcgacagacatgataccatgccaatgaggtggagtggcgatgtgcacaatatcaacattcgggtccagaatcaaatcgcggaaatcatgataagcggctattttttccttcaccagtttctttcccaattcaagatgatttttatcaacgtcacaaacggcaaccaaacgtgtaccggcataattgacatggcctcttcccatccctccggtaccaataatacctttagtcaattgatcactcggagcgatatacccatttcccaatacgtgacgcggcacaatcgaaaagagcgcaacccctccaagagttttcagaaaacctcttctgcttgttctcatagtaaattataatttatatagattagcaacctattattttaataatataaataatatctgacaaatatactaattatctaataatccttgcagatattcacgtgtttttatcacataatcatgtcttgcaccattcaattcgcattcaatagtcaatgctccttgaaatccttgcttcttcagttctgcaatgacagccgggaaattcacctctccggtaggaatgggtacttcagctcccaattcatacggattgttcgggtccggatatctaccgtctttagcatggaattccttgataaggctgccgaactgcttcacggcatcaagagaattcgcttttccgtacatcaataaattagccaggtcgcaattgataaacacattacctgtagcgatatctttaatggcacgaatcaaagtcgtcggcgtttcctgtccggtctcaaaatagatcatcacaccgcgctgcttggcataattcgccaaatcctgcatgaccttgataaaatctttatattgttcggaagagggatcttccggtataaaaccgaaatgagagtgcatagcgggaatttccgccattgcacagaaatcaatcatttcatgatatactttaattttttctgcccgttcttcttttggcactagaccaatcgtagccggtccctggcgaaaattccaaacacaatggcttccgggcacaccgacaaccgttgttacctttatattatgtttcttggaggccgcctttactttttcagcaaaatcttttgtaaacttgtttttctgataattaagttcacaagaaccaaatccctgatcatgcaaatccttaaagcttttatctacatcgcccaagtcatattggataaccccaatcgttatcttatcctgagccatcattccggaacacacaaacagcaatgcaaaaatcaataaagagaatttagttttcatcatctgatatagattaagttataaataaagaaaattaaaaagagggacaaccaaagggttgtaagtctttttggcctccctcttcatttatgaaaaaacaaaagtaataatttattccattgtcggattaaaagttccgccccaattattgttttgttcgagattcggattttccaatattttactttcttggattggaaagaaataataggattcttgaattaagaatttattttcagcaatagcactgataggaaccattctaagaacatatttgaaattttcaggagtcaacaaataggaattcgcttttctctgagcctctgttatcgtcatttcagatccatcttcattaatagcaatcgcttcaattccatatttttgtaatccatttaattgcatcatattacgagttcttctaagatccataaaacgatgcccttcaaaacaaagttccacattacgttcatccaaaattgcctgtcgaatttcttctcgaccaccaacttttaatccatacaatccatcctctccggcttcgatccctgcacgcttccggatttgcttcaacatatcaactgcaacatcccggtgccccacttcattagccgcttctgcataaataaacataacttctgctaatctcataaatggataatcatgatcaaaagtagataccaaatcttgactcaaagaaacatcagaacctttacggacatacatcccactaataacgtcattttgcgtagctgtacttcctacattcggattaattccatatgaatcctcccgaacagcaatcccaacagatgtatattgacggtatccagtcgatgtaccagatacgggatacaaagctgcgttatataaaatacaatcttcaaaccgaggatctctattcatccaatatctctgtaaaaaaacatcctcatttcctacataatacttgccagttggatcatcaaagcttttcccatctaacattggaaaagcttttaccatatcccaagttggcgtgttattagcattactccgactcaatgaagccggtcgaatcgtattctcccaacctgcagttttatcaggattactatatataataggaaatacaacctccgagttcccatccacaagccaattgtcactatatttatcggtcaatttaattccttgagagatacaaaaatcataagcttcttttgctgcctcatatgcttcattccaatacttattatcatatctatttgaaggattaaattgcggagaagctttataaagtaacattttcgccttataagcctttgcaaagcactgatctatacgtccataatcatttcctttcgcttttgcaggaagcaaactaatagcatcatccagatcttttataagcaaatcaaaacactcagctgtagaatttcgagtcacaaataaatcgtccttatctttatcctgtacttttgtaatataaggcattcccccatgataaacaatcatttcaccatattgataagctctcataaaaagcatttgtcctgtcaagctattttttacagactcagaacaagtcccttcagcaagatactctattcctaaatttatattacgtatattcgtataattccaacgtttatagccactaccagaagtcgtaatcgtgcttaacataaaaggaatacctgtctgttgttcggccgtattatctgcaccagtatcccaacctttaaaaatatctccataaagatctgtaacatatgcagttgccaaattatcatcattccaaaccaattcagcatcataattccacaaattcgatatatctaagctattgcatccattaaaaaatagaacgatagccaaaccgactaatgaatcttttaatttattcagtttcataatttcaacttttagaatgaaaaattaagtccaaatgtaaatgatctcatcaaaggaaatgaatcataatatttttgctccggatccatgaattcattcatggccgatatagaaaacaaatttgttgcattcataaacacctgagcatgaagtaatcccagcggacgtaagatcgaagctggcaaattataccctatattcaaattttttaagcgaacataagctccattacgcatccaaaaatctgtatttccataacccgactcatactgatttttaccgatcacccggggataaacaccatttggattttcaggactccaacatttatcactagtccaaattggataataaggacgagtgtttccgccatattgcggaatacctttagttgcatcacaaccaactagacgatcatagctacccactccttggaaatgcatgtcgattgttattcctttccaactaaaacttcccccaaaaccataattaatacgaggagttccattttcacttagtaaattataagcgtcatttccatcaatctttccatccggtcctaaagaataaccatcaccacgagtatcttggaacaaaagtccacccaaataaggatctcgtccatattgtttaaaacctttagcaatcaactcatcaacttctgcttgatctgtcaataaatgatctaccttcaatcctgtaatacgacctgccgacataccgaccaaagataaatcctttagatttcccgtcatgtaaataacagattcgtctaatacatcccaacgatctttagaatatccgatattcatatacaaagaataatttatgccatgttgcactttatctctccaagtcaaagtaaactcccctcctctccatgaacgttctgcataattttcaggggctaaagaagcaccataagtactaggcaaagtagtagttcgagaccccaaaatatctgtttctttccgataaaagccatcgatcgttccgctcaatctattactcaacagagtaaaatctattcctccattaattgttgccgatgtggcccaagttaaatcagtagtaggcatactacccgtttgaataccatttgccaatccttttccaaacatataactacttccggtagtatacctttctatgtattgaaaatacccaatcgatttattagaagtattcaaatcattaccagtcgtaccataagaagcacgtattttcaaatcatcaagccactccgaagtattttccataaaagcttccctgctaatacgccatccaagagaagctgaagggaaaaaaccccatcggcgatctttcggaaacttattatttccatcataacgaaatgaaaattctgccatatatttggaatcataattataagtagcacgtccaatccaagaaagatgcgaacctaaattttcggattcattaacagagactgtccgtctttctggatctgtagaaaatacaaaccactgatcataatctgtcaaaggatcattagctgtagcatagatcgcttcaccttgactttctgcttgttcaaaagtaatcattccaccgacttcatgttttccgaatgaatttttgtagtttaatgtccagtcaaattgttcattccaaaactgacgagcaccatacgttaagttctcatagttagaaccaaatgtataaatattatatttattcaaatctaatggtcccggtataaatctgttatcaggatctccagactgaaaattatatgctttttgatgagacatatacttcttacgagcatagtcgtttataatgtaatttcccgtgattttagttgacaatcccggcaaaattttacctaaatcaatatttaaagataaaattccattcacattacgcctacgtgtcttaatataacggtcacctaacacaacatcagcaacattccaacctttaaagttgcttacatccggataaattggataatctgttttttcattcgcaggagtaccatctaaataagcataagaaggaactgttctcaaacaattaaatgtagtccgataaaaatcaaatatatcttcactatcatctccacttcctggccaattaaatcgtctatcatctttttgatatccagatatatttgcattcaaagatatatatttagacaaattcactgttaagtttgaacggaaagagtatttattattttccaagtttttataagagccttcttctctgataaagttgcctaacacataatattttaccttttctgttcctcctgtagcactaatagaatgcttcgtattccacggattctgccaaatcaaatcattgacattataatcatgtgtttttgcatattccatctcttcttcattattcggtaaaggcaacccgtttgcttcagcaaccaaattctgatacaccaattctttataagcactcatttcatccgaaaaaagcttacgcgttggcctattaaatgtgtaagatccttgatattcaaatttagatttacccattgcatctgcaccagacttcgttgtcaccaacacaaccccatttccagctttagacccataaacagaagctgtagcagcatctttcaaaaaactaagttggtctatttcatttggctcaagagcatcaaatgcggccttatccctaataatcccatcaataacaaacaacggatctccgaagccaccacgcatacggatttcagaactagcccccataaagccagaacttccaacaatagtcaacccaggagcacgtccagctaacgtatttgataaattagttgttgaaatcgttgagagctcttccgttttcacattcgttattgcaccagttaaattaacctttttttcaacaccatatccaattacaataacttcatccaatttctgagtatcctcaagcagtgttatctgataagaattttgtcctccatctatcttaattttttgatctatataaccaatatatgaaataagtagaattgccccattcgatattccattcagaacgaattttccatctacatctgttattgtaccaattcctttgttatcttcaagcgtaacattcgcaccgattatcgctaaaccttctttatcgacaatccttcctgatattgtgtgtttttcttgctgtactccattttgtgcaaactctgacctctttattttttttacactatcatccttcagaaatacacgattatttactattttataagagatccctgtattcttaaatacctctttcagaacattttctatatgttcatttttaagattaacagagactttggagattttcttatttaataaagtctcatcataagaaaattcatacccagtttgttcactaatacttcgtatgacggtaccgactgtcgtttgattcaaggccagttccagattcacatacaaagaatgcgcatcgcttgtcgccatagcgggcgatgcagctgacaaaaacattgctaatgtagcaattgatgcatttttaatcatacatgtgattcaataatgttagtactaagtttttaagtttatagttttcttttgttgtgtgtgttacttttctaatctgtcatttcatcataggcattcattttttattattcatatataaagatttctttcccctctatccgatattggatgggagctaaatatttcaagagtttcaagatgtcaggcaagctttcatcctcattgatcacacatcggaacttacgctgggcaagcttcgttgattctaaatttatgtttacattaaattttacggagagttggttaactatttccctcaacgtgacattttcgaagacaaactggttcagtcgccacgccgtacatacattcacatccacaacctctgtggcatattcgttcttattgttgtcatatgtcaccttttctcccggtgacatatctaaaatggggttccactgcttatcgagtaaagcaactttacctcttgctaaaacggtttctacgttttggtgtttctcgtctgtttttacattgaaagcggttccaagaaccttaatatttacataattggtcgaaacatatagtgggtactgagcattctttgcaacgtcaaagaatgcttctccttgcaaggagagctttcggttattttcggcaaaaacctcaggtatcctcaaagaagacccctcctttaaccaaacagccgatccatccgcaagcacgatttttttcacatcttccccttgttccaccctgatcgttacacaattgtccggtttcagatagccccatcccacataagaaaaagagacaaataacaagattacggctgcgtatctcatcacagagcgaagtatttgaaatcgccttctactatttatcttggcattcaatccattcaatgcctcttcgatatgctcaggcgtattatattgagtgaacttccacgaaacgcgaagtttcatcaattcagagaaaacctcctcattatcaattgataatttacgccattcttctacctgtttcatttcttcaggagaaagcatgtctgtcaaatattttgctaaaagcctataatcaaaatccatttttatttcctattacttatactaaacgaacaacttcagaaaaatacggagcaaaaaagcatttttttcatacaattaatgggcagtcattcatcaggcaaataagacattaataattaaccacttacaacaaaaacaaaagtttcaatctcaggcaaccggacaaactaactcgtttcctgtcgcaaactaagtcaaatcacccgaagaactaaatgaaaacatatagtaaagtagccgttagtagttactacctattacccttatgtagtactacctattgtcgattggtagtactatataaggacgataggtagtactacatatcaataatatattatatgctttgagttagtttactatgactttcgaattagtttccagcatgttccgtattaattgctccgtgaaaacgaggaaactccggacaaacctccggaaacaaaaaggtgtcggttctatgccggttacaaagttcaaccgacatcctttaattaaatgtttattagagagatacgagcaaaaatgccagatgtcggtttcctgtgtgtttttatttatatttttatgcaaaatgagacaagtgcgattacccggatctctgtcagagtaatcgcacttatgcgaagtgtagcattgaatgatgaagattactttgccgtatatgacttctttgtaacgactttaccatccaaatcaagaacctccagattcatctgatcaccattagtctccacagaaaccacactgttatttgaatttaccaataccggaaatttgataccggcactcggttcctcatatttgtttcgatggagatgtccgcatagcatcagatccactccgagttcattcaggataggtacgaatttcttcaagacgtctttctgtccatgccagatattgaggtcagcagaaggaggcatatgtgcaatgacaactttaaatttagcctgcttgaaattttcatttttatatagttccttcatccattccacctgatccgtacgataaccgtcataatcggtaataccgctgtactcgatatcggaatccggtttgtcttcccccgtatccaacattatgaaacatacaggtccttgtctgaaaagataatataggaacggttctttcggagagaaatatttctggaacgaagtggcgaactcaccacgggtttcatgatttccgcgagcgtaatacataggtttctccgaagcgaacaaatcgatgctttccttcatgaatccattaaagattgtttgttcgtccttaaattccgaaaccatatccccattgaaaataatcaagtctttatccttgtagttcgcattattcagcagtttcgtaatgatgttttcacgtccgtgaatatcattgatcatgacaaaagaggtttcttttttatttggatcgcacgttgtaaacgtcaaagcattctttttgtaaacatccgatgctgccacacgtccgtatatgacattaatcccttcatgcgacaacacttcctgagaataaatacgataacgataggttgttccgggagtcaacgcttttaccttcacggcatgcagcaaggaggtatttttaaccccattagtcgtatcgaaatacttaggccgttcttctccataataatgagttccgtcattcggagccaactctacccagccgatagacggtttatccgctacccagacaatagttgcctcattctcttttacattctgcagataaggcccgtaaaggatctttatctgcgcagttgccacctgagtggcaactgcgagtaaaaggacatatatcaattttttaatatacttcattgcaaataagttttattgcatctattaataaccatcgttctggaccaattgagggttcgcatccatttccgcctgcataataggcagatggaattgcttcttgtcaaaataacgaacttcaaccaaacggtcttcacgagaagcattcacatcgatcacggcacgacggtccggatccggttcatcatagtcgacagtaccacacaaacgatacaagtcaccaggcataacagtctctgccaccttctttccggttttggctccgctctggtcatactcgtcccagcgaacgatatcttcaaaacggaaaccttcaccagccaattctatcgtacgttccctccttaccagttcacgtactttggcctgtgtatcatatttagaacggtcaacagcgatatgacctccgcgcaaacgtaaccggtcgatgatgttcatcgcttcctgcaaatcctgattcagttcgaccaaacattcggctttcgtcaacaatatttctgcataccggaagataatcgggcacaaggcatcgtcattcattgcagctgaatattgtccctggttgggatacaaatatttagcccacaacataccggtatgggaagcattatccgccgccgtataataatctttattcgaagagccgttcggcagcgtcttgtcgagcgtattgaaaacccggggtacattattacgccccacccaatccaatccggaataaataaccgtatttttcaatcgtggatcacgattgaaaaacggatggaccgggtcataaccggaaccagcttcatcgatcaacttgccatctgccatttcaaacatatcaaccatgttttgagtcggcacaaaagaagcccagccaccatccgaattattatagaaacggatcacatcaccataagcataagtcgtttggacatgttcataagtacaaataatttcttttgaattctgtccggccatagaaaacatattcagaaaatcaggatctaattcatactgattcagagctattactttattggctgcatccaatgcctccgtatagttgccccacaacaaattgaaacgggcgatcatcgagaggaccgttcctttagcaatgcgtcctttttctgccggtttctccgctatatgttcggcactccacatcaagtcgttcatagcatgctccttcacctttgcttccggttcacgcggcagtttagcatcgtcagccgttgctggtacaaaatccataataacagcatccccataccaagttgccaaataagcatgactatatcccctaattgcccgtacttgcgccagaaaatcattcttctccgtttctgtcatggctgaagccggaaccaaatcgatattttcaattacgaaattacaacgacgtatcgtttcatactgcctccaataattcggagccgcagtaggagaaacgctacctctacccatgtttctcatgttagaagcattcgtataattgaagccgatatccgaatagctgtcttcgtagaagataaacttcgatccaacatagttattgacccaccaattgtaggcagcggttactgctgcatcgacatcctcggacgtgttccagaatgtgtttgtcgtcaactgatctttcggattcaaatcaaaaaaatcatcacaagaagtaaagatacctgtcccgaccaagcaaacagcaagacctaatatatttttcagtttcatatataattcatttaaaaagttacattaataccgaatgaatggcttctgctaataggataaacatccaagtttcccgacggcgactccggatcagcattgaacggcaaactgtcgaatgtaaacagattttcgcctgtataataaatcttcgcattggctattcctaacttattcgtccaactcttcggcaacgtataacccaaattgacgttcttaatacgcaggtaattcgtgttcatacaccaaaaagatgaattcacgcgctgaggagaactgatcgagttttcctctaggaacagacgcggccattccacatttgtattttcaggagtccaggcatccaaccaattcgtactcggatgtgaagtatccccgataaatgaaccgacgacatctcttgagaaataacggtttgttccagtcacaccctgcataaataccgacaagtcaaaatttttccaaccagcactcagtgtcaaaccaaaagtcgttttaggctgttgcgtgcctttcaccacccggtctttatctgtcaactttccatctccatccgcatctttaatccgaaaatcgccgcctttgaaaggcaaagaccatggattgccatactgtttttcgtaagcggcagcctcctcgtcgcttttgaacaacccatctacttcatatacataaaaagattgatagggctctccgattcgattaatcatatagccatcgataatctcattgacaccagccaaatccaacaactcattcttattataggagaaatttgcattgattcccattctccaatccttattgaaggaatgattccaagcaaagcttgcttccacaccactgttccgtaaagagcctttattgtcctgatacgtccccgatataccaaacgtatcagaaacaggaatatccataatgatgtcagaggtcttacgattataatattcgacactcagcataaactcgttcaagaaatttgcatcaaagccgattccccagtttgtcgaattttcccaggaaatagtcgtcaccttatggcttacaaccgtaataccttgatgaacagagccgccaaacgggaaattttttcctatatataacgtaggtaaataaggataatattcatccgatacggcatcctggtttccgagcaacccccaagatcctctaagtttcagtgactgcaaccagccatgcgtgttttccataaaatcttcttcggaaatgcgccatccagcagagaaagaaggaaaatatccccaacgatagccttttgcaaaacgagaagaagcatcggcgcggaaattggcttccaaaagatacttgcctttatagtcataattgagacgtccgaaataagataacaaagccagttcacgggaataaccactgttcgtttgtgtcgaagaatcaccaccgttcaaatcggtcacttcactattcgggaaacttttgcggaaagcgtataaattccgataatcatacttctcgatcttataaccaaccattgccttgaaatgatgatcttggttaaaagtcttgtcataattcaacaatgcatccaacgtataacgactccatctcgaaatcgtttcacccaattgatcaggtccatgataattcacatcgtcataccaacattccttacgataatcttttgtttcctttatattcgttacataagcaccttgtaatgtgaatgtcagcccatctataatatgatagtcaaaggccagtattccagaaaaattttgcaacaaatgatatttccgactattaatatcgacccaagcggcaggatttccatctgagatcgaaccgtaagaaccatcttccttcttatatggaatccaaggggctatacggtccgcttgacgtatcaattgagtagaaccgcctccataagacgcattcggttcggaatagtcgttatgaataaaagccatgttagtcctcatggtaaatttatccgacaatttgatatccagattcgttcgcaaattaaattgttgacgatccgaattcctcaatgtgccttcctgccctaagaaacctgcagaagccatatatttcacatcttccgacccaccactgacattgaggctatgtttatgcataaaaccggtccgataaatatagtctgtccaaactgtattcggatgcccataaggatccgttccatcctgaaataaacggagatcttcgtctgtaaaacgaggagacgccccatcctgtgtcaataactgattataaagacgggcataatcataagaacttaagcgatcaatcaaagtcgatacatttgaaaaactaacattaccattataagagactgttgcttttccggctttccctcgcttggtcgtaaccaagattaccccattggcagctttagaaccataaatagcggccgaagcggcatctttcaaaaccgaaatcgattcgatatcattaggatcgatcgaatcgaaagttccagtttctatcccatccaccagaatataagggttagcattgttcaaggttccgactccacgaacacgtatagttgacccgtcactaccaggctgccctgttccagatgttatcgtaacccccggagtcaatccctggagagcagaagatacattcgtcaccggccggttgatcaattcatctttaccaattgtgcttaccgctcctgtcaggtttactttcgtttgtgttccataaccgacaacaaccacctcatccaaactctgtgtatcttcgtgaattgtgattttataatcgttttttcctttcgctacggcaacctcctgatctacataaccaatataggaaatcatcaatgtcgcaccgtcttcaattccctccaatgtaaaatcaccgtcgacatttgtcaccgtaccaacaccagcacttcctttcactatgacatttgccccgataacaggaagaccggtattatcgacaaccgtacctctgatcgttctcttgacttgttgaacacttgcaaaagacacattttctgtctttgcgttatcttgtaggaaaatccgattatcgactatccgataagaaatatccgtattcttaaagactttctttaaaacactttcgatgtgttcattttttacacggacggatacttttgaaatttctttacttaaaatagattcatcataagaaaattcatagcccgtttgctcgctgatactttgtatgatcatacctacagttgtcctgttcaaagacaattccagattcacatacaaagtattcgcttcatttaccgccatcgcaggcgatgttgcgactaaaaatgctgataatgtcgcaatagatacttttttattcataccatgtgattcgtttttgttagtactataaaaaacagttaactttttaccggatacacccgtacccgccaataacacttcccataccggacagcatttttttaattaaccgctgcaaaggaatatccccgatattacggaactgtttacctcagattacatttcaatttcccatagacattcatttttttgtttgtttttcagatatataaatttcggaactctcaattcgataggtaatcggcgccaaatagcaaagctgctccaaaacatccggcaagcgctcgtcttcattgatcacgcaacgaaacctgcgttgagccagcctcgacgactcgatgtttacatttacattatatttgattgataattgattggcgatttcacgaagtgtagtattctcaaaaaccagttggttaaaccgccatacagcacagacattcacatcgacatgatccgtaaaacaggtattttcatcccaggaataggcaacacgttctcccggattcatttctaagattttctttccgttcaaggcatgcaagctgatacgccctcttactaaaacggtttctacagacttatttccagcgttaacattaacatgaaaagaagttccatgtacctctactttcacataatcggtagcaacgataaatagtgaattagcattctttgcgatgtcaaagaatgcttctccttgcaaggagaccgtccggttgacggcactgaatgactgcggtattttcaatacggaatttccccttaaccaaactaccgaaccatcatccagcgttactttttttacgccttcactatctcctaaagcgatagtcatataagtttccggcttaaaataattccatccgacagctgaaaacgaaacaagcagcaagataacagctgcatatttcaacaaagaccgggcaatccggtaacgccttgcccggttaatccggacatttacctttttcaaagccatatctatccgctcgttatccgcatactttgctgtattccacgaaagacgcaaacgtaacacttcagaaaaaacagtttcattctcagccgacaaatcacgccacctcatcacttcctccatttcttccgaggaaaggctgccaatcaaatattttactaaaagtgcgtaattaaactccatttctaccttgttatattaggcaaaacgaccaacaacgaaaaactactgagcaaaaatgattttttttcgtttatattaatttatcaagcgtatgtgccatgcgaaagaaaaacggcacaaagcatataataatcatttctggacatatgtccctttaaaaaccggagcgccaaatacaaatgactctctaccgtgcgttgcggcatccgggtctgctccgcaacttctttagccgtcaacccttttatataagtaaggatgaaaacttcacgacgctgcgctggcaggtgttccagtaattcgtacaaatggcgataaaaatccttaacggaaagttcctctataacagaatcatcacctttcaatagattttgataatcttccaaatacttctcgtaagtatgagaatggtatttttcaatcgagaggtttttcttgaaatagtccagacaacgagtataagcggattgaaaaagataagaatggaaaccatcactgacatatagcttttcacggttttcccaaacatacagaaaaacatcctgaacaatatcctccgctgctttttgctcaaccatagaagcagtataagccattatccggggataatagtaacggaaaacaccattaaaggcttctctattccctttcttcagttcatacaataaagaaatatcgaacatactaccagcgatttaagaccattcaattaacatcccacccgcaaaaataataatatttttacaaactttgcttatttacagacattctcctttaataaaatgcaagacaatggtattttttatacttttgtagataatactttaaaaacatgaataatttcacaaaatatatctgtgccggattggctatcgccttactcataatacaagcgattatgatttggggattatatggaaacttcaacggttttctgaacgaattatccgactgcacaagaaagcagctaccgcagctaatcgacctgttcacgacaatgattgtcacgaattgggttatcattgcagccctgcttttcaccctgttccgcccgaacagaaaacagaataactgttaactactagaatttctttatcaggaaagacggggttaccctcagataaatcccggcagagaaactggttttggcaaatgatttatagccattctgctccgtaccgcgaaacacgacaggcaaatgctcatagatatccaaatcaatgccaagcgaaaaaccttttgccaattcacgcgaatactctaagccaaagtaaacacaagaaggatcatcgaaggtaagaccttcatcggatgtcgagacagctccataaaacggactgccgaacatggaaataaactgatgacacctccaataggaagtcttcacacggaaatcgtaaatatcggcagatgcacgtgcatatacaccatagccgttatcgaaaggccacaacttaccggcctgctgataatagccggcaacatccagttccacatttacactcttgaatatcttatgccccgtgttccacactcccccaattccgacagcaccgttcatcaatgtctggacagaattggtcaggatcgtatcaatctctcctcctctgtgctgggccaaaacttgcaaaggagcataaaaatgaaaacgcgaatccggatcgttaaacttgaaacgggtagacaaaccaaccgtaaaagcctcctgatggatatcttccctgaagataaaactttcccaattcacccacacatccaaatcgaaccggcaggaattatacaacaattgcaatcccatctccggatcggcgaccatattcaattccggattgtacaatggctctatcagattatgattggccgccccatacaaatcgcccagcacgatattcacatgatcagacaaggccacctgcgcccggaaccaaggaagtgcatgaaaacctctctgatactgatcacctttccaatgcgcaatatcctgataagccatattcggatagcgattcgccccccaaaaacgttgcaaatgaacaccagcttcgagtttcagcatttccaacggataatagacagcctttgcctgcaaccaaagtcccggcaatgtataacctttcataaacgaaccggtatactcatcatccttaaagaaactcagattatcaaattcgaccgaaagttcccctttcttttccggatctatccggaaatccgtcttgaaaacgcggtccggaatctgggcataaagtgtgtagataaatgaagtacccgccaaacagaacaggagacacaaactaatgcgcaaacaagaaatatttaaaagacttttcatctattacaaatttaagtacaaacgtaacaattaaaaaggaataaacgaagaacggggatacagaatcttgtccatatccccgttcgtatactttgatgctattatttattagcgtctcggtgttgcttcttttacaaccatctggcgaccttcgtattcagcgccgtttaattcttcgatagcgtttcttgcttcgttttcgttaggaagttctgcaaaagcaaagcctttagaacgacgagtatcgcggtcaatgatcaatttaactgattcaaccgtaccgtactcttccaaaacctgttgtaagtctgattctctaacccgatagttcaggttaccaatgtaaatattcatacaaaaaatgatataaaataattaataaaaaattgaaacaataaaacttttaggaaagatcaatgtctgctaaatcatattctgcaatgaatattaagtcggagataaagaactacacaaacagttttgcttgtcgggtacaaagaaaagcattaaaaatggatattgcaccatgaaaccaagatttaattcataacaattcaaaaaaaacacatagaaaagacttttccctaagaacatccttaataaccataaaaagtttgaaaaagaggcttcaatacaataatatgtaaaaaaggcctattttatagtatttctgaccaattaagccagcatatagccttttatgtctcaaccagaaaacctaattttgccccaatcattttgaacttaatttgacatggaaaaaatcgaagttaaagaagccaaaggaaaacttggtattctggttgttggggtaggcggtgcagttgcgactaccatgattacaggtacgttggctgcacgtaaaggattggctaagcctatcggctcaatctcacagttagctacaatgcgtttagaaaacggagaagaaaaagcgatcaaagatattgttcctctgaccgacctgaatgacatcgttttcggcggatgggatattttccctgataatgcatacgaagcggccctatacgcagaagtcttgaaagaaaaagacctgaacggcgtaaaagacgaattggaggcaatcaaaccgatgccggccgcattcgaccataactgggcaaaacgtctgaacggcacgcacatcaaacaggccgctacccgttgggacatggttgaacagctccgccaggacatccgtgaattcaaggcagccaacaactgcgaacgtatcgccgttctatgggctgcaagtacggaaatctatattccgctgtctgacgagcacatgtcgcttgccgctttggaaaaagcaatgaaggacaacaatacggaagctgtttccccaagcatgtgctacgcatacgctgctatcgccgaaggcgctccgttcatcatgggtgctcctaacctgtgtgtggacactcccgccatgtgggaattctctaaaaagatgaatgtgcctatctccggcaaggacttcaagagcggacagactttgatgaagacagtgctggctccgatgttcaaaacccgtatgttaggcgtaagcggctggttctccactaatatcttagggaaccgtgacggcgaagtattggacgatcctgcaaacttcaagacaaaagaagtcagcaagctatctgtcatcgacaatatcttcgaacctgaaaaatatcctgacttgtacggagacgtatatcataaggtacgcatcaactactatcctccccgcaaggacaataaagaagcatgggacaatatcgacatcttcggctggatgggctacccgatggaaatcaaggtgaacttcctttgccgcgactccatcctagcagcccctatcgcacttgacctggtgttgttcagcgatctggccctgcgtgccggcatgtgtggcatccagacttggttgtcattcttctgcaagagcccgatgcacgacttcgaacaccagcctgtacatgacctgttccagcaatggagaatggttaaacagacgttgcgcgatatgatcggggaaaaagctcctaactatctggactaaaattcaaggtaatacaaatttagtttcataggtatgaaacttttgttccatgcctatgaaacttttgttccatgctgatggaattcccggtataactttctcccggataagggggaaagttttattatttttataactttgcacacattttactgacaggatgaaaagagttccactaattcatattattattgcaacaggcttcggctccggtttttctccgtttgctccgggaacggcaggagccttattagctacgctgatatggcttgcattgtcttgcgccgtatctcctaccctgcttcttattataaccgcattactggtcggcatttttacgattgccggcatccgttcggcaaacgcagtcgagcccatctggggagaagatccttcgcgggtggtggtagacgagatggtaggtgtctggattccgcttttggcagcaccggcaggtaacctatggtatgcattggcagcattcgcgctatttcgcctgttcgatattttcaagccgttgggcatacgcaagatggaaagcctcaagggcggagtcggagtaatgatggatgatattttggctggaatatatagcctcatcctgctaatcggtgcaagatggttgattggataaagaaaagtgcaagagcgttttcggagaaaggcgggatattcatgttcatacgagcccaattttcttcgcagattgccagtgcgacagactttttagtcacaatcttgttagtcaaattatttggagtttattacgtatatgcaaccttcaccggttctgtctgcggcgggatcgtgaactgcatcatcaattataaatggacattcaagtccaaagaatgcaagaagcgacatgtgatggcaaaatacctgctggtctggatcggcagtatcttactgaacacctgggggatctacttcatgacggaaacgatcagcaggaatccctgggtccaggagacactgaaacattatatcgacgacttgttcgtcttctccaagatagtcgtctcgctgcttgtcggatttctttggaactataatatgcaacgtgtctttgtctacaagaactgtaggatcaggggccgtttccagaaagcgaactcaaaataaaaacaaaatagtaagatatgaaattcaaagtttttagagattggttgcaacagacgatctacaagatcatcaacccgatcgtacatggaatgattaaaattgggatcacccccaattttattacgacgacaggattaatcctgaatattgtggctgcctgcatattcctttatgccggaatgaagggagagcgaggtgatttctattatatcggctggggaggcggtatcatcctgtttgccggactgttcgacatgatggacgggcaggtggcgcgtatcggcaaaatgagttccacattcggagccttgtacgattcggtactggaccgctacagcgaactgacggttttcttcgggatatgtttctacctgatcaatcagggatatgtcatcagttcgatcgtcgctttcattgctttgatcggctcattaatggtaagctatgtccgcgcccgtgccgaaggattgggacttgaatgcaaagtcggtttcatgcaacgtcccgaacgcgtagtgttgaccggattaggggctctctgctgcggtatctttgcacccatgatggaaaacaacgagatgttcgaaccgatcatgatattcgtcattcctttgctgatcgttgcgatattctccaacatcacggcattcgcacgcctgaatcattgtcgtaaactattgagcagcaaagataacgaatgaaaggaacaattgtactcccgtcaaagaaggaggcagggactgttatcggcttgacagcgctgtttcttttgctgacagccgtatgtatcggattacgcccggagcatgtgttcatggttgggctttacctcctcctcttcttcgctggcaagacaacccgtaaattagctgttgccttattgccattcgctcttttcggcatttcatacgactggatgcgtgttttcccaaattacgaggctaactcgattgacgtggaaaacctatataatctggaaaaaagcttgttcggtataaatgataatgggaatatcctaattccttgcgaatatttcgcgatccataattgccggattgcggacatccttgcaggtatattttatctctgctgggttcctgttccgatagctttcggattgtggctctatctcaagggataccgtaatttgtacctccatttctcgatggtattcctgttcgtcaacctgattggctttgccggatactatctccatccggcagcaccaccttggtatgcaatcaattatggttttgaaccgatactcgacacaccgggtaatgttgccggtctcggcaggttcgacacattgaccggcctttctatcttcgattccatctatggccgcaacgcaaacgtattcgcagcagttccatcattacatgctgcatatatggttgtggcactatgttatgcgattgtcaataaatgcaataaatttgtgattatcctgtttgccatcatcatggcgggaatttggggaacagcagtttacacctcacatcactatattatagatgtgacattgggaatctgttgcgctcttttaggaatcctgcttttcgaaaaaggattgatgaagacaggctggttcaaaaacttcttcaaccgatattataattacattaaataatgtaccaatgaaagaatttcttcgtattggcacattattcattgcatcttgaccttttttgaagtagcatgacatcctaactttgccacaaataaaagttaggatgtcatgtataaacaaactctaccattattcctatgcatattcttgtctgcatgtgatctgatcgattaccatccgtatgacggccggctcaccatttccgaacgcgatatcaacgaccacaacatcccgcttatcgaggcagcaacaaaagataaagacacgatccgcttcgtcctgatgggcgatacccaacgtagctacgacgagacagaagatttcgtaaaacatatcaatactaaaaaagacagcatcgatttcatcatacacggaggagactataccgagttcggcatgaagaaagagtacgagtggactgtcaatatcctgtcgaagctcgatatcccgtatgtcggattgatcggtaaccatgacgtaatcggcaatggtgaccaggttttcaacaaattgttcggagaagaaaacttttcctttatcgtccgggacgtcaaattcgtttgcctcaataccaatgcgatcgaatacgactactcccaccctgtccctgatttcggttttctgaaagaagagctgcaagacagtacccggcattacagccgcacgatcgtcgccatgcatgcacgtcccggaagcgaacagttcgataataatgtaaaagacgtatttcagctatatatccgtgaatttccctctttgctgttttgcctgaacgcacataaccatcagttacaggtggaagacctttttgacgatgggatcatctactacggctgtagcaatatagccaaacgtaactacctattatttaccctaaccccggacggctacacgtatgaaattatcaatttttaaatggatgctcttatttcttttcctggccggcactttacaggcacaggaggaaatcgaggatgatgtgcgatataaaaaacgcgtagaaaaatatatatccagatgggaaaaactcattccccactataccaagctacagttcgccggatcaatgggtatgctttccctcggaacaggttggaattattatcgtaatcactgggaaacagatgtatatttggggatagttccccgcaactcggatcgccatgctatggcaactcttacactcaaacagaattattacccttggaacatccatatcgccgacaagttatctttcgaacctctcgcctgcggtgtctatatcaatactcttttagatcgtgacttctggggtaagcagccggacaaatatccacaaggttactactggttctccacccgcatccgtacccatgtttttattggagagcgattcacattgaagctaaacacaaaaaagagctggcataaatccatttctttcttctacgagctcagtacctgtgacctatatctgataaacaagatcgggaacggttatctgaaacccaaagactatctaagcctctcgttcggcctcaaactacaaatcctataaagcaaaaaacgggaggtgtcattacgacagcctcccgttccccataaactacataaaacacttaaaagaacaaacttccattagaaggcaagacctaatcggatgccccagttattcaatccatcgatcgaataactcaggacttctcctttattggttgcataattatagtaggcagcgacatgcagaccgatctgtttctgaggtgtaaaatacatagtcataccgatttcgggagatacatagaaaccccaattacggtcgtatactttcattacattcatataagtcgacatttcactatagcttgcacctaactgcacaccagcataaggctggaactggctttcgggagctacgttgtaacgaaaagctgcaccaaaaggcaactgaaagatagaatgctgctgatcagaagtgatggccgatgtagaacttaccggcaacgtctgacggtcgatatacttattgttggtatgataagagataaatgcacctaccgagaaattaggaattacataataaccagcttccgcatgtgccccccaaccacttgtcttgtctgagaaatcctggctgaacggagaattaatctgccagtcaacattaaaatacatgttctttacaacctgggcaccagccagggaaggtatcgctaaacaggcaacaagtaaagcgattaattttattgatttatatatctttttcataagactcatatttatcttttaattcgcgtttaattattttttcaggtacggtgactgtacaaaagcctgctcaatagcacgagtagaaagttcgatatttaccttgtcggaaccggacagcaagccagtcatgtaagcagtccagagaaccggaagtttagcatctgcagattttggcagcggagctttcaaattgaccagttcaaccaataaagaacctacactatagctgtatacaacaggatacggataataccatccattccatgtgccagtccaattaccccagtagccataccaccagttatatcccggatacccccaccaccagtaaggattgtcatgatagtttgtaaagtaatttacatttttcacaaaagaaacctgcaaacccaaatccgcagattctttatccgatgcacgtgtgtaaccacggccttccatgccactaaccaaagtagagacgatatcgtcagcttctgttgcactccagaattccggtttttcactgctaccgataaccattacactatcagggatgtagaaagttgtaaaggattcgaaattagcatccttgttgtgatcagtgaatactacgaaatcatcgcttagttttgacatgtctggatccttctggcaagacgccagtaaaagaaccaataagaaaaaaggaagaatctttttcatctcattcaacgtttaaaacagtttatactattatttatgcacttatatataagttactatttaaacaacatgaactaaaaaaggtttgcattctcccttttcaagagtgttaattaacttgtctgaagattttagaacggttataaacgactgttaatgaacacagcaatctcgtgtattatccagtgataaggccgtccattcttagtggacagtagtgcatcggggtatattttaatccatctgtttcctgttcttcagaagtctttgaaaagcctaaactttcatagaacttcacagcgtatgacgatgaattgacagttatctgcatttgaagctgatcggcatagacagaatcaaatatttcacctattacttcaataagtttttgattttcaataaaattttgcccatacttcaaccaacgatttgcaaaacttttgaatttatttcatttgctcagattctttgccatccaaaaattggtgagagaaagctgatttgctctccgtttttgttcttccgttactatataccccctttgttcaaagaatggacgggctgttaaacttacttctgatgtaatccgtatgattcctgttgcagttgcataccgttctatttcatttagaagtatcgtagcaatacctttaccttgaaaatctttatgaacaaacatagaatgcaaataaccttgttgggtaatggatgcaaagccgacaacctgtaactgttgattagttgctacaatgaaaaaatgcgttctaatcatttcttttatatgggagatatcgtttccgcacgatgcccaatcttccacttctgcttttgaataatcacgcctgtttatattgaggactgtatcttgaaataagtctttgagctcaaggacatcagcaggttgggcaattctaattgtaaaatctgtattcatattcttaacactcatattatctatggcaaggctttatatacttgataattgctatttatcaatagttatcaaacactacaatacaaatatatggacatttctcagataaacatgttttattaccggtttatgtttaagtagatgtgtttatcgtcaaaaaaagggatgcccggctttcggacatccctttcttgattctgctttctattatttcttatcgcaaagttccttgctgtgcttcctgtaccatttttgagttgggaaggataaggatttctactcggcggttcaaagcacgtccctcaggagtgctgttatcggcaaccggttcatgtactcccttgccttcataagtcatgcgcttactgctcacaccttggtcttccatcagataatcgaatacgctctttgcacgtttttctgacaacgtctgattataatcaacttttcctgtattatccgtatgtcctatgatttttatgtccgtatccggatttgcattcaaactggcagccaagtcacgcaacgcactcttggaagcggcactgacagtacttgaattggttgcgaacaagatacccgaatcaaacgtaaccttcagtgcctcgccattattaatggtttcgacagtcgtttcttccggcagcgtagcttccaattccttcttttgtttgtccatcttcttaccgatcaaagcacctgcagtaccacccacggcagcaccgattatcgaacccaatgcagtattaccagccaaagcaccgactccggcacctactgccgcacctccgccgactccgatagccgtacctttagcggtattgttccatgttccacaactcgtaaaaacgactgccatacaaagcagtaaaactgataacaacttaaaatttctcatcttcttattcttttataaactatattgtaactatacaacagtctattaatcgaacatgttgatggaatcgcaatattcaagttctccctgtacaataaaagtgatgtcttcaggtgagaacttgcctacaccgtctttttgcgcattctttacaacaaacccgatcaattcatcttcatcaatatcaatttcagcattgtcatcggaattttcatcaaggaaacccttcgactcataaaattcataaatcagatccacaatataattaatatcgtcattactgaattttcctttcaattcctggggaagatagttctggataaatgctacagaatcatcttcatcataaattaaatcatctttgtcactcatatctttttaatttttggttgatagatgctacaaacataaacaaaaatattcgttatccatacaggtactcaaaaaaatcaattcgaatcttaaacaggttcctaatgcatagctttacgaggactaaccctatgcattagcctccgtaacgcatagggttaagttgaaccaccttttaccgcttctgcaagcaattatcacaacatccgcatcgtgtcccttccataccgaaatattcggaaataaactcctgacggcaaccgtgagtctcaagatattccgccaccttttcaattcgcattttgaaagcagccaaacgattttcataagatgcagtcgtaatgacaagacggtccaaagggacgcggatcatcttaaaagtgatccggggttcttttcgaggagggacataatagaagccgacatttcgcagatatcccagtactttcgccaccatacgcgcttccagtccggttcttcttgccaacatatcgacactgacgaaaactccggcagaaaagagcccttcgtaattccgtaaaacctcgacagcgactttggcggccggagaatcgtcgttcagaaaacgatccatcgtccaacgaggttggtcataccgcagatagggttgtgaattaggatagggttcaaaagtaagatagttcgacaaagacaatatttcaagagaagagcgcaaacggcccttatcgaaatgccagcttctcaaaaactccggttcatccagatagacagacacgccttccccatccccttctgcaatctgaaaacggttacacaacgcttcatatacccgtttgatatattcgaccgtagggaaagcattggaaggacgtctttttatatccgttatgtcctgcggtcccaacaaagctacagcgtaagcccgtttcccgtcacggccggcacgtcccgcctcctggtaataagcctccatcgaatcaggaaactccgtatggataaccacccgcacatcccctttatcgatccccattccgaatgcgttggtagcgaccagcacacgcgtaaatcctttcacccaattcgtctgccgctctgtcttcagaaccggatccaggcctgcatggaaatattcggcagaaatacctgccgcccgcaactttccggcatattcttccacccctttgcgagtacggctgtaaatcactgcagagccgggtacggccgacaggatatggcagatttctttcaatttattatcggtcttacggactacgaacgaaagattcttccgctcgaaagaggtcttgaatatcctatatcctttgcgaaaatggagctgctcgcagatatcggcaaccacagctgccgtggctgaagctgttacggcaattacctgaacatgcggtatggcatcgcggatatccgcaatcaaacggtaatccctacgaaaatcgtttccccattgagagatacagtgcgcctcatccacaaccagcaaattcactttgcgggacaacgtcttcaacttctcctgaaacagttcggaagaaatacgttcaggagaaatataaaggaacttataatctcccaagatacaattatccagttgttgcaaaatctcccaatgcggcatttcggaactgataaacgccgacagaatccctcgcttttgcaggttctttacctggtccttcattaaagcgacaagcggactgatcacaaggcaaatacccgaattcgccaatgcaggcacctggaaggtaatggatttacctcctcccgtcggcataagcgccaatgtatcatgcccggacagaatactgtctatgacttctgcctgtcccggccggaacccgtcatagccccagtaatgcttcagaacttgtaatggatgatgcatattcaaatgttttcacaaagatagaacatccagaccaacaaaaaaagccctactccttttgggagcagagcctttcacataaatatatatcaatccaaccatcttcggtcaattcttgaagaccaaaccggcaccgttgctgtcgattgtgatcgggcgatctttgttgatctttccgcccaacaactctttggacagttcgttcaggacatacttctggatgacacgttttacaggacgggcaccaaactgcgggtcgaaccctttgtctgaaataaatgccagagctgcatccgtaaattccagcgcaatcccattctgggccagcatcttcttcacactattcagctgaacagtcacgatcttgcggatctcttcttcgttgagcggagtaaacatgatgatgtcatcgatacggttcaggaactctgggcgaattgtcttcttcagtaattccaacacctggaccttcgtttcatccactacctgatcgtgcgtttcgggtgtcatcttctcgaagttttcacgaatcaaggacgatcccatgttactggtcataataatgatcgtattcttgaagttgacgacacgtcccttattgtcggtcagccgtccatcatccaatacctgcaaaaggatattgaatacatccggatgagccttttcgatttcatcaaacaggacgaccgaataaggtttacggcggatcgcttccgtcaactggccaccttcatcatagccgacatatcccggaggcgcaccaatcagacgagtcgcactaaacttttcctgatattcactcatatcgatacgcgtcatcatattctcgtcgtcgaacagatattccgccaacgctttggccagctctgtcttaccgacacctgtcgtaccgaggaaaataaatgaaccgatcggtcgtttcgggtcctgtaatccggcacggctacgacgcactgcatcagcaatagcactgatggcctcctcctgcccgatcacacgcgtgtgcaattcagattccagatggagtaatttttccttttcactctgcatcatcttgctgacaggaattcccgtccaacgagataccacatcggcgatatcttcactgtccacttcctccttgatcatggcggaagcaccttgcatcgtcttcagtttctcctggacttccctgatctcttcctccttttgtttgatctttccgtaacggatttcggctactttaccgtagtcgccttcacgttcggccttatcggcttcaaacttcaggttttcgatatcaatcttattctgctgaatcttattgatctgctctttttcgctttgccactgagccttctgtttcgtttcttcgtccttcaggtcggcaatttccttattgagctgttccagctttcctttatcattttcacgcttgatcgcttcacgctcgatttccagttgcttgatacggcgggaaacctcgtcgagagattccggcacagagtcgatctgcaaacgcaaacgggctgctgcctcatccatcaggtcgatcgccttatcgggcaagaaccggtcagtgatgtatcgtgtagacaactggacggctgcaatgatggcatcatctttgatacggaccttatggtggttttcatatttttccttcaaaccacgcaggatggaaatagcatccaattcgttcggttcgtccaccataacaatctggaaacgacgttcgagcgccttatccttctcaaaatacttctgatattcatccagcgtcgtcgcaccgatcgaacgcaattcaccacgagctaaagcaggtttcaggatattggcggcatccatcgcaccttcgcccttaccggcaccgaccaatgtatggatctcatcgataaaaagaatgatttccccatccgatttagtcacttcacccactacagctttcaaacgttcttcaaattcgcccttatatttggccccggcaaccaaagctcccatatccaaagagaaaatctgtttcgatttcaaattttccggtacgtcaccccggacgatacgatgagcaagcccctcggcaatcgccgtcttaccaacacccggttcaccaatcaaaatcgggttgtttttcgtacgacgactcaggatctgaagtacacggcgaatttcgtcgtcacgaccgatcaccggatccaacttgccgctacgggcacgttcgttcagattgatcgcatatttccccagtgcatcatatgtgtcttcggccgactggctggttactttattccctttccgcaattcttcaatcgcttggcgtaattcattctccgtcataccggcatctttcagaatttgagaagcagtgctcttttccgtgaacaaggccaaaataatcggctccaaagacacatactggtctcccattttggatgaatagccgattgctttctgcaaaacagtatttgcttcacttgacaggtaaggttctccgcctgataccttcggtagcgaactgatctgcgcatccaatacacgattcagattctggatattgacacccagtttctggaagatgaaattggtcacactttcacccgtcataatgacacctttcagcaaatgtacggcttcgatcgcctgctgcccattctgggtagcaagttgcacggcttgctggacggcctcctgtgctttaattgtaaaattgtttaaattcatatagttatactcctttcaattctatttttatttctaaatttccacagacattcctacaaaacaaataccagaaacaaaatatgtcattttgtcatatattttaaaacttcgcattaaaaagagcctgtcgaacagtctcgtttcacgccgttttttacatgttttcggaaaaagaacaagacggctgggaaaaaggtttacttttacctcgtcaagacagggctttttctacttatagaatttcaggaatataaatttaagaaatatcttcggcaatagtgtatcctaattcccggtcatcattcttatcttggaaaagataggcattcccttcaggagattcaatataataaaggtttatataaacaaaatcgggattgtcccgtttcaggactctggccacattatcagggacttttgtatctaaactgatttcataccttgtctctttccaaaaataataatcagtttcaacctctcctctaaaagaaacaaatttaagggtgtcgttatgaaggacaaaataatcataatatcctccattattctgatatcctctaatttcagaaccgtcatatttcttatagataaagtcaaaatgagctttcggcaaatcaacaaaccaagtagagtcattcggtgttcatgtatatatagccaagaacatcccatcatcattcaaacctttgtgtcagtcattttccaaatatcacccacataccagatcgaaaattcattttgatctttatccataaaatctatttgagaaaaattcgaatattcctgataattcagggaatcctacaatcgtattttttgataaaattcttcaacaacttcgacaaaagcctctggcaaccgtctcaacacttcgattttccaatcttcggacattccataaaaggcttctgctattcctcccgtaatgcaggccaacgtgtctgaatcgccaccgagagaaatggccaaacgaattgcagtttcaaaatccgtactttccaaaaaagcgacaatcgcttccgggacagttccctgacaacttgggttaaagcaatagtccggccggatctcgtcacaggaaaaattcaaatcatataaaaaagtcgtttcaatgtattcccggatagcttgcttgctttttcctgtacgagccagatagatgacagcagccacagcttgagcccctttgatcccttccggatggttatgggaaacggcagccgtttcttcagccacttgcaatgttttttccaatgaaccaaaagcccacccaactgcgctaacccgcatagccgaaccattcccccaactgttataaggctgtggattcgtttcacaaagccattgcccgaaacgtgctccatagcctcccatcggacacggaaactccctgccataacgatgcataacttgcacgagattccctccatacaatagccagtcagtcacagcgaccgtcataatcgtgtcgtccgtataattgcttttcctggtaaataacggaaaaaccgttgtctttatattatcaaactcatatacggaaccgataatatctccggctattgctcctatcatattactctcatttttattcggacataaaaatacaaaacaaccttctatatcccaaacagaaagtgaagtgactttccagcctgaaaccttccggcggcattacccgcataaatctctctacccgtgagcgtcaacttcttcaccggagctccggttttaaaattcaaatctttgaaattgatccaaaaaatatcggggctaagcgttgactcgaaataatacactttatttttttgatccgctaccgtacgccagcgagtcgaagcaatattgggctgttcggggatagagattcccaaaggaatcgaaacattgcgcatcacaccaaaaactccggcaacaacctgcctgaaattatcggtttgcggtaatgcctggatataaaacgatgcacggacaaagcgatcagaagcacggtttgtcccgggtagcataaccagaccgccaatctctttccagtaatcattcaaagtcaactgtttgtcataggtaggggaatttgtcattatctggcattctcgtccctcatgaataatcagattgccgttgatatattcaaagatggcactattcccggtcgcatccgaaatcgagaggtgcaaagtcgattttgctccgttaggtaaatcagggtcatcgatacggaaaatttccaggctcaattcattcacagcttcgtccaccgtcgcaaaattatccaagacatattgtgtccagatgctcaatcccatcaccggacgactatcattcggacgatgataagaggattcggtcaagaaaagcaagttcgccaccaggcctttctcattcataccgtcacaaactccgatatcatatccggcagtcacgacactcccatatttggaagtccacgtcaccgtattgtccgtaatccctccccgtttctccattccccgagggaaaaggtaaatattcgattgcggatcctctttccaatccatcgtccgccctgtcacgatcatatcatccggtcccagatagaccgcacgcgtacaagctttgttttgctctgcaaaaaacatcatgcctaaagctaccactgaaaagacggctaacttatttctttttgccataactataattttaaatatgtccaaactatatttataacagggatatgagaatgatagttccagttgttcaaaacaacttgtaacagaacaaaatcaacaatccctcctttttgcaccatttttctatttcatcgaaaattccgatccatactgttcttacgttttggcaagattaggatgccctattaattcaatttagataggaaagaggtgtcattttgatgactgtgccgaaagtttcctccctgtgaaaaaggagaaattatattttggtgaggttacctcactgaaaatatgtcaatagaagaaaatacattacatttgtcttatcattaaaataagtattaggagatgaaaattataacatacaatgtaaacggcctgcgtgccgccgtaggaaaaggattgcccgaatggctggcacaagaacaacccgacgtactttgcctgcaggagaccaagttacaaccagaacaatatccagccgaagcatttgaagcacttggctacaaagcatggcttttcagtgcacagaagaaaggctacagcggagtcgcaatcctgagccgccgagaaccggaccatgtagaatatggaatgggaatcgaaaaatacgataacgaggggcgtttcatccgggccgatttcggggatctgtcggtgatcagcgtttaccacccttcgggtacgagcggcgatgagcgtcaggcattcaagatggaatggttggaagatttccagaactatgtaatggaactacaaaaatcgcgtccgaaactgatcttatgcggagactacaatatctgccacgaaccgattgatattcatgacccagtacgcaatgcgacgaacagcggcttccttccggaagaacgggaatggatgactcgtttcctggatgccggctatattgacacgttccgcctcctcaacccggacaaacaggaatatacttggtggagttatcgtttcagcgctcgtgccaaaaacaagggctggcgtattgactattgcatggtcagcgaaccgatgaaagcacaagtggaaaaagcgtatattttaaatgaggctgttcattcggatcattgcccggcagtgatcgaggtgtcgtaaatcaaattccgcactgcctcttgataatctgccaaccgggaacttttcaatatttttttccggagccgtttctctgcatccggcaacaggtaatcccaaagggtcttcatcttgtcgagtacctggtgttcgcctccctccagacggaaagaatagcccgctaacagtaaggtatggaaagcagacaacttctctatcttctcctgagcggtaagcggggtatcggatatatattccgttgccagccaaggagaagacagcagaccacgtccgatcatgatacctttcaaacggggaaaacgtctggttaacgaacgaatatccggcaaagtccggatgtctccattatagaaaagcggaagcgtgcataaatcataaaatcgggaaaaggcacttaggtcagtctttcctttatattgctgcgtaccgatcctgggatgcaatgtgagatgtgtgaggggcaatccgttcaaaaaaggaagaagcgcttgcgcctcctcaggagaatcccaacctaaccgcagtttgaccgagaattgtatctccgggaattcaaaaatcgtttccaacaacactttcacctcatccggataaggcaggatacccgctccccgatgttgtcgtgcctgcatcgggaaaggacaacccaaattaatatcagcacgccggtaccctgattcacgaaacaaaccggcaatccggcggaactcttcgggcgaaactgcgatcatctggggaacaagtgaggcggatgtatttgcttccggtacaagatcccgcaactccttattgcgaaagccagtcttttcgagacggacaaacggagtgtaataggtttcgacacctccgaatatttgtgcatgtgcttccctataaaccgagtcggtataaccctgcaatggggcaaaatgaataacatacggttccatcattccggaaacatttcagtgaaaagtgaatgaagacgtgctttggcctcttcaaaatcctgctccatccccatctctttctcaagcgaagtaacccctttatctttaaagccgcaagggttgatcaaagagaagtaatccaagtcggtatttatattcaaagcaaaaccgtgcatggtgacaaaacggctgcttttcacaccgatcgcacaaatcttacgggcttttctcggtacaccaggatcaatccacacacctgtagctcccgcgagccgctcccctttaatgccatagatagctaaaaagcggataatggtttcttccaacctgtcgatatattgcttgagtcccaacttccaggtatcgagatcgaagaccggatatccggtgatttgtccgggaccgtgatacgtgatatcccctccccggttaatatggtagaaagagataccccgctgcacaagctgttctttcgggatcagtaggttggtgtccttaccactttttccaatagtcagtaccggctgatgttcgcagaaaaacaaccggttttccccggtcctgccttgtgctttcgcttccaacaaggcgttgaaagcaaccgtctggcgttccaatgccttctcatattcgatacgtccgaggtcatgatatataaaatgactcatatgattatcgttcttatgtaaatatttttttcgggcagacggaccgtcgtgtcggattccgcccggagcttcttccgtctacgcaccttcctactgccggattcagaatcgggatcaccactgtcataccccatttcgatcttaagcagtttccccatcagcgacatgatcttcgtctgccgtttcagcatataaggagaaggttttgcagagttgaacttgcggggattcggcaaggtcgcagcgatcaaagccgcttccgcctttgtcagtttataggccggctttttgaaatgagcctgtgcgactgcttcagcaccataaataccgtctcccatttcgatcgagttcagataaacttccatgatacgttctttcccccaaatccattcgatcaggacggtgaaataagcctcgatgcctttgcgcaaataagtccttccgggccagagaaacacgttcttggcagtctgttgcgagatagtgctcgctcctcgtacacgtttgcctttttcggcatcggcacgggctttctgaatctgtatcatatcgaaaccgtcatggtcgagaaaaagattgtcttccgaagccacgaccgcctgtaccaatggctgggcaatttgcttcaaaggcatccatttgtgttccagcttgatgggcttgctatcccgcacctgttcgtagacgcggatgaacatcagcggagtgtagtaaacaggtatgaacttatatgccaccacagccaacaaactagaaacaaacaggaacagcaacaggttccggcttcctatcagtatttttttcaatatgcgcatcgattcttgtcttttcggacagcaaacttacggatttatttccaatattgttccatctgctctagtgtcctaccctttgtttcgggaacgaatttccagataaatagggcagccagaactcccatgacaccataaacccagtaggccatgccatgattgaacgtatcggtcagatactggttcttatcgagcatcgggaaagtccaggagacaaggaaattggcaatccactgcccggcaacggcaatactcataacagtcgaacggatcgtattcgggaaaatctctgccagcaatacccaacagaccggcccccacgacatcgcgaaaccagccgtgtacaccaacatacaaaccaacgaaccgataccgacagaatgcgtatagaaagtcgtccccaagatcatcatcgagacggccatgaccaatgctccgataatcatcaacggacggcgaccgaaccgatcgaccgtaaagatagctagtacggtaaaagagaggttcacggctcctaccacgatctgttgtaacaaggcggcatcagtggcggcccccattgtcttaaagatctccggcgcataatacaacacgacgttgatcccgacaaactgctggaaaccggacaaaaggacaccgacaaatatgatcagcacgccgaatgaacgcaccgggaagaccagagatacaaaaaagctaccaatcaaagcgatctccaaagcactcgtgtttccagccagttccaatgctccatacaaaagcagaaacaacaccagccacatccccataaacagaaaatagggacgcatggaggattcctgtttcctgaaactttcttttatttccaccaattcaggtgctgctctttcttttcccatcaaacgatccaatacagacaatgccttatccgtcttaccgcgcatcaccaaataacgaggcgtttccggtacaaacatcagaagggccagaaagagcaaagccgggacgatttcggacgcgaacatccaacgccagccgatcgtatgcaaccaggcggcatctccctgcaacgcgatactgtaattcacaaaatagacgacaagcataccgaaaataatcgcgaactgattccatgacaccagatttcctcgtttctccgccggggccatttcagcaatatacatcggggaaaccatagaagccaaaccgactcctactcctccgacaatccggtaaagcacaaaaaggtacatgaacgtgtgatctccgctaccaggcatcccgacaaacaactccggccacgccgaaccgattgccgacaacaaaaacaggatggcagccaacacaagcgtaggtttccgtccataccgctggctgatccaaccggcaaaagaagcacctaagatacaaccgatcagagcgctgctcacaacgaatccttcaagcgcatttgcctgatccaatggtagcccgaaaggttcgataaagaatttacgcagcgattcaaccgtcccggatatcaccgctgtatcatatccgaataataatccccccaatgtcgccacaagggtaattccaaaaatgtaatagttgttgtttttcacgatagagattcatataggtaaataatgttttatccgctacttttggtttgattcaaaagtaacggataaaattatttatatgttattaaatgtactgattgataatcatctcatacaattcctgcttcccgctgatttgcttcggttcgccagaggcaagagagattgtacgcaggtcttcgaggagaagtttaccttcttcaaacttcttaccgtcaccctggtcgaaactagcgtaacgttcggcacgcattttcttgtaatcagaatgttccaggatatcggcagcagccatcaaagcacgggcaaaagaatccataccactgatatgagccagaaaaatatcatccagatcggtcgagttacgacgtgtcttggcatcgaagttcgtacctccggtagtcaagccgcctgcttcgaggataaccagccaagcctgtgtcagttcgtagatgtcaaccgggaactgatccgtatcccaaccattctgataatcaccacggttggcatcgatactgcacaacataccggcatcggcggcagcctgaagttcatgctcaaatgtatgcccggccaatgtggcatggttcacttcgatattaatggcaaaatccttgtcgagaccataatggcgcaagaagccgataaccgtttccgtatccacgtcatactggtgtttagtcggttccatcggtttaggctcaaccagaaaagtacctttgaacccgttcttgcgggcatagtcacatgccatcgtcaacatcatggcaagatgttccttttcgcgtttcatattggtgttcagcaagctcatatacccttcacgtcccccccagaacacatagttttcgccacctaaagcgatacaagcatcgatcgcgttcttgatctgcgtgccggcacaagccacagcagggaaataaggatttgtggcagccccgttcatataacgtttatgcccgaacacattggcggtagaccacaacagcttcttccccgtcgcttcctgatgttgtttggcatattcgaccatcgtatgcaggtccttttcaaattcggccaacgtcggtgcttcatctacgacatccacatcgtggaaacaatagtaaggtatgttacatttcgtcataaattcgaaagcagcatccatcttatacttggcacgggaaatacggtctgcgcccgcattccaaggaaatgtcttcgttccgccaccgaactggtcggctccctccgcacataatgtatgccaataggccatagcgaaacgcaggtggtctttcagagttttacccattacgaccttgttttcatcataataatgaaaagccatcggattttttgactcgcgtccttcaaactctatttttccaattcccggaaaaaattctttttcacctttaaagtaattcatgataataagtattttattgattatacaatgctttcgtttattacgccaatgctttctccaaccgttctttccagacctcgaaagccccgcagtatttatccgctttcagtccgtccggctctatcacattgatctttttcagggaagcaaacgcctcttccgccgacgcatagatgccggccccgataccggcgcctttggcagccccgacagccccgttcgtatcgtaaagttcgatcaccgttcctgtcacaccagccaacgcatcccggaaaatagggcttaggaacaggttggcattaccggcacggatcaccccgatatcgatccccatctcattcatgatatccatgccatatttgaaagagaagacgatcccttcctgtgcggcacgggcgatatgagctttattatgaatgttgaaattcagcccgtgaatggagcaatccacctgcttgttctgtaacatacgctccgcaccgttcccgaaaggcagaatcgagaggccctccgaaccgatcggaacagtcgccgccagctcgttcaatgcaggatagcttataccttccggagctacattccgcttcacccacgaattgaggattccgaccccgttgatacacagaaggacccctaaacgcgtccggtcggccgaatggttcacatgcgcaaacgtattcacacgggacagcatgtcgtagttcaccttgccgttcacaccatacacgacccccgacgtaccgcccgtagcggctatctcgcccggattcaggacatttagcgacaacgcattgttcggctggtcaccggcccgataggtaaccggcgtacccttcttcaagcccaactccgaagcgaccgatccgagcaattccccctgcacaccgaaagtcggacggatatccggaaccagttccttactgaacccgaaatagttcatcagatcttcagaaacgctattattccggaaatcccagaaaattccttccgaaaggcctgaaacagtcgtgacaatatcgcccgtcatgcgcatggcaataaagtcgccaggcaacatgaatttatgcacctgtccgaatatctgcggttcatactcttttacccatgccaatttggaagccgtaaagtttccgggagaattcaaaagatgtgccaggcattgcttttcgccgatcgacttgaaagcgcgatccccataaggcaccgcacgactgtcgcaccagatcaccgacggacgcagcacctgcatcttcctgtccaccaatacgagcccatgcatctggtacgagatgccgatcgcatctatctccgttcccttgatgcccgccttcgcgatcgcaccctttatcgcttctttcagatacatccaccagtcatccggattctgctccgcccatccgggacgcacggctttgatcgccgcctcttctttcggataaaaatcagaggcaagcgtcaaccccgtatctttatcgacaatagaagccttcaccgaagaacttccgatatcacaacctaataaacacatactatatcatatcttattaaacttcgaatgcaacttgttatatttcaccttatcgaaccggtaatagcgggctgcccgatgattcactcccgtttccacttcatccgtctgcacgacatattccatcgccgtcatctttttatggaaattgcgtacatctatcgtcttattataaatgatctcaaaaatgcgccgcaactgataggccgtaaactttgacggaagataatcgaaaacgatacccggttcgacatccacccaccgccgtatctcttcgccggcagcttcaacaatttccttatggtcgaatggcagatgtggcaattcatttacaggtgcccagataagagtatcggacatctcccccatcgtcattttcttcccgaacttacacaacgccagataagcgaccgtcacgattcgtgtgattttcattttggaagcattttccagccattgcacatcctctttattcttggtacgggcaggagagccgaaactgcggaactgtttcaaggctacacgtttcagacctgtcgcttcgttcaagacacgataagcggccgtatccagatcttcactctcataaatcaagcttcccggcaatttgtagtgtttctcgttactaccggcaacttgtctttcgacgagcaacacgcacagtttatcttcgtttgtcccaagcaatacgcaatcgaccgaaacgtgcggataaaacatttcatgcttattttcctgtgtttccataatatcccaataaagattctccgcaaatataaggttaaaacgacatacgacataatgtaattcgaacaatatctactcaaaaggctaaaaagcccgttatttaacatacattatcactcacagaaaaaggaactgtaccaaacctgaattttaatgcgattatccggaaagggaagaaacttctaacatttattcaatacatttgttattaaaaaaagacgtactatggatatcaaacatctacagttctcattccgaatgtactgggcgaatatgaagggcttgctgaacatggtggccgaagggatcatactcgtcgcctctctcgcctccctcttcatcctggtctatcagttcggattcaaatattcggcccatgtcacccatatgttggaaaccagccgggtttacctcctgctggctttctttaccgggatatcgcttcggtatattttgaaattcaaagagatcatacaagagaaaatgttatacctggatatcggcatttattttttcctctttgccgtgctatcgggcaaagtattcttcaaagaagccattcaccagtcgctgccctacctcggtttcctcacggaaccgctgttcgtttatttcctcctgctgttgttgagcgccatccatttgtcgcggcagacattcacgctgttacaaagccatatcaagccgtccctcctgttcctgctgagtttcgtgttcgtcatccttgtcggttcgggattgctgatgttgccaaacgccacggtgcacgggattcatttcgtagatgccctgttcatctcgaccacctccgtctgtgtgaccggactgacgacagtcgatgtggcaacgacattcacgcatacaggacatatcatcatcatgtttcttatccagatcggcggtataggagtcatgactttcaccagcttttttgccctttctttcatggggcattcatctttcaccagcaagctcgttctgaaagacatgctgaacgaagaccgggtgaacgggctgttccgggtgatccttaacatcctgttcgtgacactgtttatcgaaggcgtaggggcctacctgatttatctggatataaagggagggctgccgggaggcacgcaggaagaagtgttctacgctgtgtttcatgccgtttcggctttctgcaatgctgggatctcgacgctgagcggaaacatgtatgacccgctggtcgcccaaaaatacaacctgcatgtctggatcgccctgctcatcgtattcggcgggctaggtttcccgattgttttcaactacctgaagctgttacgacatctgcttgtcaatacattcaagatcgtaatcggacagcagaagcattatatccatacccccagaattatcaatatcaacacgtatatcgtgatgatcagcacgctggtattgcttgccggcggtacatttttctactatctgctggaaatggacaatacgctcgccggattgccgttcagaggacagcttgccaatgcattcctgggagccgtcaccccgcgtacggccggattctgcgttgcggatatggggacgctgactaccggaacactcatgctgacactgatcctgatgataataggcgccgctcccatgtctaccggcggcggtttgaaagtaacgaccgtctgtgtcgccctgctgaccgcgcgcaacgccgcccgcgggaaagagaatgtggaaatccgcaaacgtgaaatatcaccggaaaccatacgcagggctttcgccacaatcgttttctatttctgctggctgggggcggccgtctggatattgtccattaccgaaaaagacgtaccggtcttcaccttgatcttcgaagtcgtgtcggcactcagcacggtagggttaagtttgaacttcagcccgttactgagcatttcgggaaaactggtcatcatcttcaccatgctggtcggacgtatcggcatactggccttctttatcagtttctacaaggaatacaaaaagaagaattacacctatccacaggaaaatatattaatgtaacataaagaatacaatatgaaatatttagtaatcggattaggaaacctgggacgcgccatcgccgaaagcctgacacgcatcggcaatgaagtgatcggcgtagatatcaacccgcacaagaccgaagcggtcaaacacaccatatccggagcaatcagcctcgacacgacggacaaagacgccttgaacacgctaccactgaacgagatggatgccatcttcgtcaccttcggcaaggacttcgggacctccatacagactgtagccctgctaaagaacttagatgtgaacaaactgatcgtacgagggatttctcccatccacgaggcagtgatccgttcgatcggtgtagcggagatcatcactccggaagatgatttcgccggtatgtacgcatcccaatccttacttggggaactcttcaaacaatggtacagagtgacggatacacaccatctctacaagataaaagcacctgtcacctttgtcggacagaccctgcagaccatagacctggaagagaatttcggagtgcgccttgtcggcatcgaacgccccaagacagaacgcaacctgatcgggttaaaacaaacccaatactccgtcatcgacaaaatcaccggagacctgagagtcgaagaaggtgatctgctcatccttttcggcaagatggaagtgttgcacaggctggcagatatctgacgccggtttattctttctgaggtatcttggaaaccaaaaccttatctatacgggcgccgtccatatcgacgatctcgaattcgaagttcaaccagctcaatttctcaccggtcttcggaacccgttccagaatctccaggatcaggccgctgagcgtattatagtcatgctcggcatacaaatcttccatgtcgaaatattcaaggaagtcatagaagttgtactgcccgtccaccagccaggtcccgtcggaccgctcgacgatctcggcctcttcccccacatcgggaacctgcccgatcagaccttccatgatatctttcaaggtgacgatcccctggatgcctccgaactcgtccgtgacgatgccatatttcacacgtgcctgcttgaactgttccaacgcattatacacactctggttttccggcataaactccgccggacgaatcacctgcgacaaagagaaatccggctcgtcgatacggccgaacaagtctttcagatagacgacgcctttgatatcgtcaaactttccggcagcaaccggatagatgttgaaaagattttcctggactttctcgcgtatctgctcgatactgtccgtcaggtccagccagacaagctcgctgcggtgtgtcatgatagaaccgacattacggtcgcccagattgaacacgcgttccacgatgtcctgctcgacttcctgcacttcgccgacatcaaagccttctttgacaatcgccttgatctcctcctccgtcaccttgttttcttcagtcgcatcggttccgatcagtctgacggtcaacgccgtactcttggataacagccacacgaaaggcgaggcgaccagcgaaaggaaattcatcggtttggcaactagcatcgacacacgctcagcatagcccataccgatacgtttgggaaccagctcgcccataatcaatgtcagataagtgacgatcacgacaatagtggttttggaaacccccaacgcataaggttccagaaaaggaatgcggcggacatgctcggccaggtcataggcaaaagcctcgcccgaatacaaaccggtcagaataccgataagcgtaatcccgatctggatggtagagagaaaccggtccggttcgtttgccagcttcaaagcagtcttggcagatttgtttccacgttttgcttccagctcaagacgagccttacgagctgacaccaaagcaatttccgacatagaaagaaggccgttcaataagataagaccgataataataaatatttccatttgctatatacacagcgattgattagagaggcgaagatatgaattattcgaactctcacatctaacaagatgaaaataaatctaattaatatataaaaaaagccattctatcttcgcagacagaacggcttcatgtgtcgataagtttcactaactcttatttaaaattttattagaaaacagtatcgggagatagatacatacttactcgattacctcgcccttctcattcagaacaaccgtctgttccttctgatctttgtcgacaaggacgactttatacttcttagcaccgtcggcaccggcaacataggcttccttcaccgtactgccctcgtaagacttggtgattgcatcctgcacggcctggggaagttcctttacctcgattttcacgaaatcgtcctgcattacgttttcgactgatacctgtacagtcgatgcctgtacaccttgtgatgcgaatgccacacatgctactaccgctaccattaaaacaatctttttcatgactctaacaatttaaaagttaatacctaagtgattactaaaacctttattcaatctgatcaaacaagtacaaggatcgtaccacaacagcatgccaaaaacatgataaagtgtcccagagcttacaaaataaggggtagaaaaagagcaaaccatcggatacccaaccataaaacatgggaaaaagtgtagaagtccgtgtattttttctacaataaatgtggcacacctcttccaatctccattttaattgttaatttagccacatcattaatgaaatctaataaaatatgaatttaagtgatcccaaagattgtctgtattgccagaacaatcagactttacacgagctgatgatcgaaatcgctcctctctcggtatccagactgttcctgttcaaggaacaaacgtatcgcgggcgttgcctggttgcctacaaagaccatgtacacgacttgaacatgctcagcgacgaagaacggaacgcattcatggccgatgtcgtacgggtgacccgcgcgatgcagaaaatattcaatccgcaaaagatcaattacggcgcttattcggacaaactgtcgcaccttcatttccacctggccccgaaatatgaaggaggccctgacttcggcgggacatttaccatgaacccgcaaaaagtatacttgacggatgcggaataccaggatatggttgaaaagatcaaagaggcgttataaggtaggcacagaagttgcaaaagtagacgcggaagatttccggacataacatataggaaggtgtgtcaaaatctccttgtccccgcacttgatgcggggatgcaaaaggacagaccttatcaatcagatttttatagggctggttttaatgcgatcccgcgtcaagcgcgggaacaggatagtttcgacacacctcttactctattaatgcttccgtgtctgcttactttacaaacgaagacttcagcaggtaatcggcacttttcttcacgccttcgaactgatgtccgctacccgtaccttccatttcaacgaaatagtccttatggccgtttgcatagaaatgcttgaatatctgctcgaagttcatcatgccggaatcacccaggacatagcggtctttgatatggagcactttgatacggtctgcatatttcgtgatatactcgaccgggtcctgctggcccatcacggcccagtaaacgtccatctcaaagaaaaccaatgacgggtccgtattcgccaggaagatgtcatacactttttcgcctttgttatggcgtccgaacttcatttccgtgccgccgggaaccaccttggcaaattccatgtcgtgattgtggtaaccgaacggtatgccggccgctttcacgatctttccggcttcgttgaagacttcacaaacaaatttcgtttcttccacgttacgggtactgggctggccgggctgcaccagatatttcactcctaacttggcatggtcgtcagccgttttcttccagtattcctttattgtattcaggttgtctttcgtgtattcgcgaacaggaggattcacatgcgaactcagaatcgtaatgccggcatcatccgccatcttcttgaagtccatcaattcgatatcacggatcttgcctttcccataaccggcaagttcgatggtctgataccccatctttttcaacttcttcattcctcccggaacatccttgtagagctcgtcgcctaaagaatagatttgtaaaccgatgttcttggccgccgtcgcttcgaaagcggcagatgtcgcaggctgcgctgcaacggcattccctaccttaccggccatcaggccacccaacgtaaacagggacgcgtttttcaaaaagtttcttctattgatcatggtctattaaatttagattgctccaaaggtatgattttattctggaaatcatacaaaaagccgtttgaaaaaaaatcaaacggcttcctgttctttcttctgcacctcagataaactcgttcaccgacgagacgatgcttccatcgaacagattgatgatccggtgggcaaaactggcatcgtgcttggagtgagtcaccatgacgatcgtggtcccttcccggttcagttcggtgagcaattgcatcacttcggctccgttcttcgagtccaggttaccggtcggctcatcggcgaggatgatcttcggattcgaaacgacagcacgtgcgatggccacacgctgctgctgtcctccggaaagctgctgcgggaaatggcccgcgcggtggctgatgttcatccttttcaggatatcgttcaccatctgcttacgctcgccggcttttactttcaggtaggtaagcgggagttccacgttttcgaacacgttcagttcgtcgatcaggttgaaactctggaacacgaaaccgatgttgcctttgcggacctgcgtacgctccttctccttgagatgcccgacttccttgcctgccaggtaataatcgcccgaagtcggattgtccagcagccccaagatattcagcaatgtagatttgccacatccggaaggtcccatgatagccacaaactcgccatctttcacttccagggaaacattattcaatgcaatcgtctccacctcttccgtacggaaaaacttacttaaaccttcgatctttatcatgactttctgaattatgtttttttgattttattctgattttatgttctttaccggattttcgttagcgacatgccagttctgatacgtcaccgtcataaacgtgatcacgcctacggccaggaaagccagcggcaacacccaccaatacatcggcgtacggtaggcgaaattctccagccaacggtgtacgccgtaccaggcgaccggagcaccgaagacgaagcatatcagcaaaatccagaagtagctcacattgaacatatacaagatttctcccgtcgtcgatcccaacaccttgcgcacggcgatctctttccgcttgtattcgctttcgaacacgacaaggccgaacacgcccacaatcgagataaagatagcgacaaggctgaacaaggtgatcaaagaaccgatcttcaattccttttcgtaggtatgctgcaaaacctcgtcatagaaacggaccacaaaaggatactccgaatcgaacttttccagcgactcgcgcacatgctccattccggagcgaaggtcgcttcccgccttgaacttcacataggcggtattataatagttgccttcctgcccccactggtatttgccccaaagatagaaagccatcggggtaacttcctggcggaatgaggcgaacttgatatccgggataaaaccgatgatctcgtcaccgtcgatcttttcgttcaacttcaattcgtactgcgccttcgccttttcgttgaatatatagcaacccgtctccttctgatcgtcttccggacggaaatcacggccatccttgacctctatccccatcactttcaggaaagaagaagaaacaggaagacactggaaattgatgttgttcccattatagtcacgcccccatcccatgtactggtcctggctcgaaagcaggaattgggaataggtcacgtcctgcacgccggagaacgatttcaaccggtccgtgaaagcatcccggttcttatttatagtattattcagatgcacgataatcatctcctccttgtcatatcccaacggcgcattctgcatataatgattttgcaggtacataaacaaagagccgataatcaggatgaaagaagccacaaactggacccccaccagcacgctcctcatccggcgcccggcaagcgagaggccgaaacttcctttcaacaccaatgccggcgggaaagaggtgacatagtaggaaggataaaggccggccagcactcccacgatcgccgcgatcacggccgtgccggcaatgatcatcggctgcgccccgaacgagatgtcggcatccaccagcgagactaccggtgttttggggattatgtataagaaaagaagcgaaagcagataagcaaacagactgacgcagaccgcctctaccaacaaacttccacgcaacgtacggtcggaactgcccagcaccttctgcgtgttgatgctcttgatgcgcataggagtcagcgccgtgctgaaattggtaaaattgataccggcgataataaggatgacaaaagcgatggagaaaagcaccagcaacgtctggcggctcgctttcggcatcgaatcgaaatccacgttattcaggaaatggacatccggcaaagaggtcaggcggagatccaagctattctcctccccccattcgaactcattgccgaaggcttccttcgcattaaaattacgcttgaaattgtccagcacctcagccttatccatcccctcgcccagacggacaaagaaaaaataattccagtttccccagttatcatagttttccttcgggctcatcgacgtgtacatgacgttcttcaaagcagagttacggggaaaatccttatatacgcctttcacgattttcgcatcttccataggattggcagagatcagctgcttgcctaccgccgattcgtcaccgaagatctttctcgccatgctttccggaaggactacgctgttgggctcatccaaagagcgctcgcttccttcgagcatatcgaaacggaacactttcaagactccgggagtcacgttccacgcatcttccttgtagctcgtccgctgtccgccatcctctatatagaaaaaacggctttcggtccaagcactcaaaaggcatccttcctctataagaggcgaagacccggtaaacgcccgcgcgaacggacggcagataatggcttgcgaccctttgcttccgtgcacgatatccacccggaagatagcatcggcgttcgggtggctgcggtcgaacgtataatcataattcacctgcatcataatgagcataaacgccacaaaagcaatgctcaaccccagcacattcaaaacagaagccgtcttgaaccggcggagcacactaaagaaatttcgcaaaatcgttttcatatccaactgttttgctttaataataacaaaaaatatgccaaatagcataacaagcaaataatcaataaaatatacatcctacagttcgaacagactgtctaataattagacaccactgtctattttcttgacacttcctcttccaatcccgcatactcctccctggcgtcgaagcaagggcaggccttgcggatgtaaggactcagttggcaatgtcccactatcttcgcctccggatagtcccgccggagctggcggagcaggtcgagcagcgaacatttctgggcgtaggtacgggtgtcggaaggggttcccgcctcatcgaggccgccttcataacagatgccgatgctccggtcgttccacccggctgcatgtgcgccgatctggttgacgggacggcaacggtggagatagccgtcgcgggtgatatagaaatgatagccgatatcggcaaatcctctcgccttgtgtgaagcccgcaaggcctccaccgggaaatcgcggtcatagcgcgtcgcgctgcaatgaattatcaggaggcgtacctcccgataattctgatagaaacatcccgccgtcataacgagcaggcgcttatgccgagcgcaccggcaatggcgctggctacggcgatgatcactttgaggagtactccccagacagatttcttttcgtttttttgttccatgatgagatttatgatttatgatttgaaaagcatggggcagggtcctgccctacgcttttctcttgcttttaattgtcaattatcaattgcttaaagttctcccggccggtcatcttcgcctccgctcccgcctccttcgttcggtttcttcgacaggtcgaccgtcgtctcgcctgccttctcggcacggagtacggcacgtacggatgcacggctgggtacgggattgaaactcataccgttgaagatctttttcagatcgtcgccgggaacgaactggatattgactccggtgatattggtggcagtaaacacctccgcgctatcggctccccggctggtcgcctgcaaacggaacttgcccaactcgccgaaatcgacctgctccccgtcgcgcagggcctcgatcatattctcgaccacactgatcaacaccgctgaaacatccgcacggctcacggtcgtctgggccgcgacacgttgcgaaagccctttcaacgtaagctccttgctgacctgcgaacgggcgtaggctttcttcggatcgtccggcttacgcggattgcctaacaaaacaatactgtaatttaatggcataaccttactttttttaaatgaatacttctctgctattaatctctgagacaaagatacggcaggcgcaaaaggcgatcgggagacaggatgagacagtgtgagccaaccatgaataaggttagatatataaccgattcatgagcagaaacacttccgtatcccagattttttccgtatctttataaccatacaatcaaacagaaaaatcatgaaaatccgtccctacagcaagagcgaactggcacaggcctatgcaccggagatcacctcccaggccgcactgaaccggctcgccgcctggatacgcctgaaccgcccgctcacggaagcgttgcgacagaccggctactacacgaaacaacggctcttcacctcccggcaggtggcactgattttcgaatatctgggagaaccataggatgactccatgacacgcggggaacgccacgcctacgaagagcacctcaccaacgtcgtgatcctggaagacgccatcgggacggccgaagagatcgggaagctataaccctgccacaccgcccggcattcccatgattgccgcccggcatttgcaggaatgcgggccgacgtttgcaggaacgcaggccggcaatcatggaaatgccggaagacgggccttgcgggatttgacacaattggcacatttgacatagggttgctaaactatatataggtaataatatatattctggtatatatacctatgtaggtatattaaataattaattatttatctcgcgtatatatatttctacaaccctatgtcaaatgtgccaattgtgtcaaaaaaacgggccggaagcaaaaaatcacaatcccaaagcgccggatctccgttccctgtcgatatcctccccggtctttttcactgcgatatagccccttttccctttataccggatcgattcgaactccagccccgccatgatacgcccgattttattcggactcaaggggtaacgcaggcatgaactgatctgctccaggatatcggccgccgtgacgaagatgcccgcctcgccctcgaacggtttgcggaaatgagtacggatcaggtcttcttcgaggttggggacttcgaagcggctgttatgcatgttcagcttccgtatctcctcctgcgagaaccagtggcagaaaccgcttttccacaaggcataagcctggctgtagaccagctcgtaagggatggcatgcagatacgggtcccggatctgcgacacctcgaaaggcaaccagcggcggttgccggtcgggtcggtcaggaactggacattattgcccgtgccgcaaaacgaagcgatatgcggatggcgttccttgttgcgcccgtaggccgctcgctcgttgacgtaaggcatggtgaccatcgccttcaactggttcaactcggcaggccgcatgccgtcgagctcctcgaaacagatcagggcgaattcggtaagggaaaagagatcgtccttattcaggcggtcgctgttcgtcttcgtatagaaatagcagcgcagttcgggtggcagcaggaagttgaaccaggtggttttgtaaagcccctgttcgccgataaggaccaggatctcatggttcacgaccgtatcgtcgagcagcgcgggcagtatgccgacaaaccatttccggaaatagtccctaaactccgcctggtcgcttttgacatgcaccgtatcggccaggtcgccgatagggtcgctcacgccgtcccatgatggcaaatggtcgaaataggattggaaagggttgaagagggggacgaactcggaatgtatcacattgtatatatccgtcagatagacgcgtcccaccgttttgttcatccgcccccaaagcgtattcacgtcacggtctgtcagcggcaggaagccggcctcctccgtccagcggatttcacaatggtgcgtgatgacattgtggcggaactccgcctgcgaaagcaggaacgcctcgatcgcctccacctcggccggcttgttcgcctcgtctgcctcccgtctgcctttgccgccagcgctccggggcaggcgcacggagccatgctcctcctttcccgcgtagcaggaacggaaggtgctctcgacgttctccgcgccataatcggcaaacgcctcgaccgcccatgcgacggcctccgcctccggcacgccatagaggttgaagaggtagccggtgcgcatgacatattcgttatggtggcccggctcatagcggattccttcgtcctccagccgttttccggacacctcggccgccttgcccgccgttgcggtatagcgtcccggtttcgccttccgtcctttcggccgacccggtttcgcggagggagcaggcggcagcttgacctggagcggcagggcttccggattgtaataggcgtccggatcataagccgtaccgctgatccgttcgggattcttgcaactgctgtcgtattccagcccggcgaggcgggcgaaaagttcgttaccctgtcggtagccctcctggtagacccggagcgtcttccgatcggcagggtcggcgtccgcgacggaactgccgtcttcaaagagaaaagcgtaaatgacgcgcagccctcgtccgctgatcgtgtggtaggccaaaaggacatgggggtcggcacagaccgccgcaaaagcctccgccatccgttcttccggtatatgatccaaatcgcaaaggctcaaaccggtataagccttgatatgcacacgcttcctgcctccttcgcatcgcacggcgggagtgaaggcggggcatgaagtcttttcgcaggccgacatttgcttgtttcctacccggaggtagaagcggaatttctcagtacggtcacgcaagtcggagtcggtagtgatgagccggtaaacacggtccaacgtgatctccgatggggttgtttgcttgaaattggcaaacaggctgaaagatttttccataatactattaaaattaattatacatttgcactcgctgtcataagcagcataaaaatacggactatccggcaaacaaaagttcccacataagggaaccggacaaccgaaaacttcctgctatttaactaattataactcatatcatgacaaaagacttcaaaaattccggcctaatcagccaagttgccgaattcatcgacaagaaaaggatcgaagagggcatcagcatcgacaccctctgccaatcggcccacatcagcaaacgcatctacatagactttaaaaggggctgaagccggcaacgacgctccactggttcttccgcctcgcaaatgccctcagcctgcacacggacgaagaaaaattcaaggaaatatggttggaaatcgcgaaaataatgactaacttagaggagtaaaaccaaatggcgaatgattgtcttccacctgtttttcataaagctgctgataggaacggtcctgcatctgaccgccccccggacactctttccggaggcctgctccaccctgctctattcttccgacgggcagttgttaggggcacggatcgcaccggacgggcaatggcgtttccctccggcagacagtcttcccggcaagttcgtgacctgcctgctgacctacgaagacaaacgtttcttccggcattcgggagtagacccggttgccatcgtccgagccatgcggatcaacctcagccggggtaaggtcgtcagcggggggagcacgatcaccatgcagctggcacggatcgcgcggggcaaccgcgaccgtaccctgtatgaaaaaatggtcgaaaccggctacgcccttctcctggaaacagccttcgacaaacatcagatcctgaacctctatgcctcgcacgccccgttcggagggaatgtgataggcatcgagacggcggcctggcgctatttcgggcgaagcgccgccgacctctcgtgggccgagagcgccacactcgccgtcctgcccaactcgcccgccctgatccatcccggacgtaaccgggcacggctgaaagccaaacgcgacaagctcctgaccgccttaaaggagagagggatactggacgaaaccgaatacgggctgtcgctcctcgaaccgcttcccgaagcgcccgtgcctctgcccgacgaagcccctcacctgctcgaacggttggcggccgacgctccgggaacgcgtatcacgacctccgtcaaccggatgttgcaacgccagacacaggagatcgtcaaccgctacgcccgcgactacgcctccaaccacatccataacctggccgccctcatcgccgatgccgaaacgggcgaggtgctggcctatgcgggaaacgtcactttcaaggccgacgcccgcaaagggaaccaggtagacatcatcacttcgccgcgcagcacgggcagcatcctgaagccctttctttatgccgccatgctgcacgacgggcagctgctccccggtacgctcgtttcagacgttcccctgaacctgaacggcttctcgccgcaaaactacaacaagacgttctacggggcggtcccggcacaccgggcgatcgaacgttcgctcaacgtcccgctggtacggatgctttcggcctacaacacggggcggttcatgtcgctgctgaaaaaggcgggcatgaccacgctgcgcttttccgaagagcattacggggcttcgctgatcctgggaggcgccgaagggacgttatgggacctcaccggcatgtatgcttcactggcgcgtacgctcgcacattaccggacttacaacgggcggtatgacccggcggatatccatccgctcactccttacccggctcctccggccgatccggtccgctcggtcgccgacaaaaggcttacggacaagccgttcctctccgccgcctccatctggttcgccttcgaagcgatgtcggcgctgaaccgccctgaagaggaggcggactggcagcaattcggctccatgaagcaggtggcctggaaaacggggacgagctatggcggacgggacgcctgggcgatcgggacaaccccgcgctatacggtcggcgtatgggtgggcaacgcttcgggagaaggccggccgggactgacaggcgtgggcaatgccgctcccgtcctcttcgacctgttctcgctccttccgggaagcggctggttcgacatgccttacgacgaactcctcccgatggccatctgccgtctcagcgggcacaaggcatccgctatctgtgaccgggtagacacgctctacatgccgcgctcggccgacaagacggaagtctgcccctaccaccggcttgtccatctttctgcggacggccgtttccgggtgaacagctcgtgcgaatcggtcggccggatgatcgcacgcccgtggttcgtactgcctccttccgaagaatattattaccggaactatcatatcgactacgctcccctgcctcctgtcaaaccgggatgcggcgaagacaggggccggcagatcgaactgatctatccggagcataacgccatcctttatcttccgaaaggcttctccggcaaacgggagcagtttgtcttcaaagctgcccacgcccgtccggatgccatcctctactggcatctcgacgacacgtatgccggcgaaacgacagaccaccaccagatcagcttctccgcttcccccggcaaacatcgcctgacgctgatcgacgaccagggcaatcgaaagacaatatcgttcgaggtgaaataatcaaaacagtttctaaaaaaggctctttctgtaaagtttttactacctttggcagtcgcaagtgagatagttagtgttacattagtttttaaatataataaattatggcgaagataaaaggagctgttgttgtaaacacagagcgatgcaaaggatgtaacctctgcgtagtagcctgcccgtcggatgttctcgaattgcacccgcgtgaagtaaacaacaagggataccattatgtgtacatgaaaaaccccgatgactgcatcggttgtgcaagctgcgggttggtttgtccggacggttgtttgaccatctacaagaagagaattgacaattgacaatgcacaattgacaatttaacaaacagaaaaaggaatcagaatattaatcacaaaacaaaattgtcaattgacaatgcacaattgacaattgacaattaaatataaggtatggcagaagaagtaaaattaatgaagggtaacgaagccatcgcccatgcggctatccgctacggtgtggacggttacttcggctacccgatcactccgcagtcggagatactcgaaaccctgatggccgaaatgccgtgggaaacaaccggaatggtcgtgctacaggctgaaagtgaagtggcagccatcaatatggtatatggaggtgcaggtacgggcaaacgtgtgatgacctcctcgtccagccccggtgtcagtctgaaacaagaaggtatatcttatatcgcaggagccgaactgccctgtctgatcgtgaacgtgatgcgtggcggtcccggcctggggacaatccagcccagccaggcagactatttccagaccgtcaaaggcggcggacatggcgactaccgcctgatcacgctcgctccctcttccgtacaggaaatggcggactttgtcggactgggtttcgaactcgctttcaaatacagtaatccggccattatcctggcagacggcatcatcgggcagatgatggaaaaagtggtattgcctcctttccatacacgccgtacagaggaagaaatcatagccgaatgcccatgggccacacagggaaagacagccggccgtaaaccgaatgtcattacttcactggagctggacccggcaaagatggaggaaaacaacatccgcttccaagctaaatatcggaagatcgaagaaaatgaagtccgctacgaagagttccagtgcgaagatgccgaatatctgctgatcgctttcggttcttctgcccgtatctgccagaaggtggtggaaatagcacgtgcggaaggcatcaagctcggcttgctccgtcccatcactttgtggccgttcccgacaaaagcgatcgccgcttatgccgagaaagtaaagggcatgctttccgtcgaactgaacgccggacagatggtcgaagacgtacgtctggccgtaaacggcaaagtaaaggttgaacatttcggccgcctcggaggtatcgtgttcacgccggatgaagtgctgaatgcgctgaaaaagaattttgaattatgattgatttgtaatacataattcataaatcataaattaacaacgatgattcgcggaagtaaaattgatacgatattgacctggttattcatggttttggcagtggcagcagttgtttgctacttcgccttccctgaaaaccggctgccattcctgtattgcggtggcgcggcgatctgtttccgcttggttcaatatctgatgagatttataagttaataatgtggcaatgtgccaatcagacaatgtgccaatccatattgttgttgacgcattccttaactggcacattggcaaattaccacattattaatataagcacattgaaaaattattcatagtatggaaattaacgaaataataaaaccggaaaacctggtatatggaaaacccaggttgatgaatgaaaattccatgcactactgtcccggttgcagccacggtgtgatacacaagctgattgccgaagtgatcgccgaaatggggatggaagataaaacgatcggcatctctcccgtcggatgcgccgtttttgcctataactatctggatatcgactggatcgaagcggcccacggacgtgcgcctgccatcgcgacagccgtcaagcgactgaatccgggcaagatggtgttcacgtaccagggcgacggcgacttggctgccatcggtaccgccgaaacaatccatgctgccaaccgtggagaaaatatcgtgatcgtatttgtcaacaatgccatctatggtatgacaggcggtcagatggctcctaccacactggaaggaatgccgacggcaacctgtccgtatggccgtaatatcgccctaaacggttatcctttgaagatcggcgacctgcttgcacaactggaagggacctgcctggtcacccgccagagcgtacatactgcggcagccgtccgcaaggctaaaaagatgcttcgcaaggcatttgaaaactcgatggccggcaaaggcacttcgattgtcgaattcgtttccacctgctcgtccggttggaaaatgacacctgagaaagctaacaaatggatggaagagaatatgtttccgttctatccgttaggagatctcaagaataaggaataataagtaattattaatttttgaagcaatgaagcaagaaattataatagcaggtttcggtggacaaggggttttgtcaatgggtaagatcctggcttattccggcctgatggaaggaaaggaagtcagttggatgccttcttacggcccagaacaacgaggcggtacagccaacgtaaccgtcatcctgagcgacgaccgcatcagctctcccgtattgaacgaatatgacattgccatcatcctgaaccaaccttcgatggagaagttcgaaaacaaggtgaaaaaaggcggtatcattatttatgacggatacggaatccatacaccggtgaaacggaccgatgtcagtgtatatcgtgtggatgcgatggacgcggctaccgagatgaaaaacgagaaagcattcaatatgctgatcctcggcggactactgaaaatcgttccgatggtgaaactggaaaacgttttgttaggcttgaagaaatccctgcccgaacgccaccacaagctcatcccgatgaacgaggcggctatcaagaaaggcatggagattataaccaatgtgcaaacgtgccattaaggtgcttagctaaatgtgccaatatgccaataaaaatataactaatattaattggcatattggcacattgttcatattggtacattatcactatctttgcccctcatgaagcatagcctatacatattattactcttgataatatccgcttcggccctgcatgcacaacgccgaccaggtggagaccggaaaggattctcactcggaaacctatccaaagccaatcaggaagtccctgacagcctgctgattccagacagcgcagcaataagcaacagacgtatcacggcctatcggctaacccctctgttgggcgatccttatattgccccgttggacacgcataaattgaatttcgccaacagcacgctggtggaatccgaatcgctggcagtcggctacctggccaatacagggtcaccggcacaaacccgcatcttttccgaacgtaaggaaccacgggatttcctgtttgccgacgcttacgattattatatcacggaccctcagaacgcacagtactacaacacgaaaatcccttatacaaacgtgatgtacacgactatggggggaagtgaaagcaaaaacgaacggctgaaaggcacgctgaccatgaacttcggcccgaagatcaacgtaggtggcgatttggactatatctacagccgcggatattacaagaataacggtaataagctgttaagctaccgccttttcggcagttacaagtcggatcgctacgaagcgcacgcttacttgagcaacttcaacttcatcaattacgaaaacggaggcttggccaacgactcggttatcactaacccggaccaatattttgccggcgagagaaaccaggacgaccccaaggcattcaatacacgctatccggtcaaggcatggaaccgggtacgtggcaaacagtatttcctcagccaccattataacctcggattcgagcgtgagctggaaggggaagtggacacgctgggaaatccagtgaaagtatttatacccgtatccagtatcattcatacactggaatatcaggacaaccgccgccgtttccgatcggaagcgaacgagaacctgaatgaatgttatctgaccccggatggatacccgcgtgtattcggtttggaaaacggcacgggtgtcgacgaccgcacttcctactggaatctgcgcaatacgttcggtctttccctccgcgaaggttttcaagactgggccaagttcggcatcactgcctttgccactttcgacaagcgcaaattccagttgccggcccagataccgggattgtcttacgaccccgaatatggaagcgggttaaacgcttctccctccaccatcgaatttccgattacacaagtgtatgacgaattctcgacatctatcggagccgaaatctccaaacgccggggaaacattctgacttacaatgcccgtggagaactttgtgtcgtaggcgacgatatcggggaatttcgggccacgggaaacctgcaaaccaaattcaagctattaaaaaaagatgcgacgatcagtgcggaaggatacatcaagaatgtcaccccttccttctatatgcgtcacttccattcccgctatttctggtgggataaccgagatatgaacatgatccagcaaatctatgccggagccaagatcaacctggagtccacacggacacagttgtctgccggggtcgaaagtatacagaactatgtattcttcaacaaacaaggaatgccggaacagaaaagcggaaatctgcaagtgataaacgcccgcatcaaacaagatgtcatgtaccgcgctttcggatgggaaaacgaagtggcctaccagttgagcagcgacaaaagcgtactgcctttgcctcaaatcagcctgtataccaatatgtatctgaaattcaaggtagcaaaggtgctgatggtgcaattgggagccaatatgtattataacacttcttactacgccccgtattacgaaccggccacacagcagttccaggtacaggacgaagtgaaagtcggcaattaccctcttgtcaatgcctacgtcaacttccacctgaaacaggctcgtttctttgtgatgggttataacctgggttccaagttcgtcaatccgaactatttctcgctggcgcactacccgctggatccgttcgtcctgaaaatgggcgtagctgtcacattcaacaactgatcttatgaaatcgaggaaactgataggagtctacaccgggctgctgataatcgccgtagcaaccatgatcatgttatggcgcctgaaaaccatgccgaaggctgaagtcttcccacgcgattatccggagatcaaagaagaaggaatcctgcggctggtgaccgaatacaatcaatcggggtattatgtggcaggtgacacgatagaaggtttccaatatgaactgagccaggctatcgcccaattatcaggtctggaaatacagatatttttggagatgagcctggccgaaagcttcgatatgcttgaagagaacaattgcgatgccgttgcccgcaatatcccgatcaccagcgagatcaaagagaaatatctgttcaccgaaccgatcgtcctcgacaaacaagtcctgatacaacggacggaagcggccaataacgggctcaagcccatccgcaaccaactcgatctggccggtaagaccctatatatccccaaagattctcccgcccagctcaggctacaaaacttaggacatgagatcggcgatacgatctacgtgatagaagacgaattatactccggggaacagcttgccatcatggttgccaaaggagatatcgattatgccgtttgcgaccagcagacggctgtcctttcccaaaagcaactcccggaaatagatatcaaaacagacataagtttcacgcaactccaatcctgggcagtccgcaaagattcccctatcctgctcgacagcctgaacagctggctggaacagatacgcaagaacggtacattcgacaagatatacaagaaatattataaataatgcatcactttatccctcatgcgacggcagcacgaaggagaaagtcgaaccgacccctaattcggattccacgtgcatggaaccacccattttcgtaaccagcccttggcagatggcaagccccaaaccgataccttccacataatcgttcaccttaacgaagcgtgtgaaaaggctctccagtttatcttttgcaatgccggttcccgtatccttcacataaaatttcagacatttatccggcaggcaggtatatcccagcgtgatacttccctgcttggtattcttaatcgcattattcgccagattattgatcaattgcaacagacggatactatcggctccgaaacagcacgtgcagctacctttttccaaaaacaactgcactccttcgggcatacggagtttgatagaggcgaatatcgtatccatcagtccgtttatatcgaccggttcataactgatcctgatagcgtcggcttcgatcttggacaggtcgagaatatcgtttatcagttgcatcagcagcaggttattggtcttgatgatctcataatattccctacgctcctcatccgaatcggcaaaagccatcaattcggaaaaaccggtgatcgcattcagcggggtgcggatctcatggctcatatccgccagatacttggacttcatcttatcggcaagctccgccttgtgcttggcttcttccagattcagctcctgccctttgcgttcctgtatgttgatcgtacatcccaggatcacaagcacccttccccgttcatcccgttcgtagacggttgccgacgattcacgccagtggtaatgatccattcccgggtatttcacacgcaactcgattttcatttccgatatctctcccgaacataatttccgaaaagcctcatcgtgtctctccctgtcgtcaggatgaacccgcgcggcaaaacgaggccatgaaatatcgaccagctcgtcttctttacccggcaaccagttatttacctggacaaccgaatcatcataattccgtttgctgtcaggattcacgaatatggaacagagacggatatcattggaatgcagggccatcttagtaagtacctgcgaacgtctcaaggtattctccatcttgttgcggaccgtgacgtcacgccacaaagccagcaaaaggggtttgccattgctcaagacaatcgggaatttcgtgacttcgatatccttcgggatgccatacgcatcagaaatcttcccgctaaattcaatagtcctacccgtctccatgacatcacgatccagccctaaacgctcttctgcgggcatgatcgcatcaaaactcagttcgaaatcattgtgaccctcaacttcttccgtaccgataccggttatttcttccatgaagcggttccaatacagatacctgaaaccatcttctgcatcttttacaaaaacgcctaacggtagtttatccaaaatcgtattgatcaatccatgtaatgaatcttgcttttgtgagattggccggatgtccttcccgccataaatgccgcccatataaacaaaatgctttaaaacgctaatttgggtataaagatatttatttttatcacaatcttccccggaaaatatcacaaaaatcaatcttcccttgaaaaaataactcttttgaaagaagagctgcgttctatataacaaatattgccaaatattatctacctttaccgggaatttaatgatgaaagatgagatttgacgaattggacttagaagaggccgtattggacggccttgacgcaatgaattttctggagacaactccagtacaggaactgacgattccggtcattttggaagggaaagacattattgcctgtgcacagacagggacaggaaagactgcggcttatgtgttgccggtgatcaatgaactcagcaaaggattacatccggccaatgccatcaatgccatcatcatggctcccacacgcgaattggcccaacagatcgaccagcagatcgaaggtttcacctattttgtcccggtttccgccgttgccgtctacggaggcacggacggtattgcctgggaacagcaaaagcgagggatggaaatgggggccgatatcgtgatcgctacccccggacgtctgttgtcgcatatcaaactgggcactgtcgatctgtcgcaagtatccttcttcgtcctggatgaagcggaccggatgctcgatatgggattttatgacgatatcatgcaggtctataaactactgccggcaacctgccagaccatcatgttctccgccacaatgcctcccaagatccggacactggcccaaacgatcctgaaaaacccggaagaagtcaagatagccatctcccgtccacccgaaacaatcatgcaaacggcctatgtctgctatgacatgcagaaactgcgcatattggaagacttgttctcaaagagccgtccgcagcgtgtcatcattttttcgtcctcgaaaatgaaagtaaaagagctggcatccactctcaaacggatgaagttcaacgtcgcagccatgcattctgaccttgagcagtcacagcgtgaagaggtgatgaaagagttcaagaacggacgtatagacatcctcgtcgccactgacgtcgtctcgcgcggtatcgatatcaacgacatcaagctggttatcaatttcgacattccccacgacccggaagactacgtgcaccgcatcggccgtaccgcccgcggaacaaacggcgaagggctggccatcactttcatttcaaccgaagaacaattccaattcaaacgcatcgaagaattcctggataaggaaatctataaaataccggtcgatcccaaattcggcgaaacacctttatacgagcccgaaaaatactccaacatgcgtcgtggcagaggacgcccccgcaaagacggcggaaaagggaaaagcgacaaccgctccggcagcggcaacaaccaacgccgcagaggaagaccgaggaaggaagcataggctaacgtttataaatatgtcggccggcatttatacaaatgccggccgacgattataagtgcatagcgttgcaaaatatagaaaacagagattcgaatccaatataaaaaacgcagaccaggccgagcccgatctgcgtttttatcaatatcgagaatcccctaacttatccgttcatcgaagccaggaactccatattatcgaatgtctgttccatgcgcttcttgacaaattccatagcctccatagagttcatatcggccaggtacttacgcaggatccacatacggttcacggtgttttcatcctgcaacaggtcgtcgcggcgcgtgctggacgctgtgatatcgacagccggataaacacgtttgtttgccagcttgcgatccaactgcaattccatattacccgtacctttgaattcttcaaagatcacatcgtccatcttcgaaccggtttcagtcaatgccgttgccaggatcgtcaggctgccgccgttttcgatgttacgggcagccccgaagaaacgtttcggtttctgcaatgcgttcgcatccacaccaccggagagcactttaccggaagccggctgaaccgtattataagcacgagccagacgtgtgatagagtctaacaggatcacgacatcatgtccacattccaccatacgtttagccttattcaatacgatttcggcaattttcacatggcgttcagccggttcgtcgaaagtagaagcaatcacttcggcatctacgctacgggccatatcggtcacctcctcaggacgttcgtcgatcagcaggataatcatatacacttcaggatgattggctgcgatcgcattggcgatatccttcaacagcatcgtcttaccggtcttcggctgtgccacgatcagaccacgctgtcccttgccgatcggcgagaacagatctactacacgtacggcgatattatcatatactttcgaagacttgcgggccgtcaacatgaatttttcgtccgggaaaagcggagtcagatgatcgaaaggaacacggtcacggacttcttcaggcgtacggccgttgatcttgtccactttgacaagcgggaaatatttttcaccttccttcggaggacggatagccccctccaccacgtcgccggtcttcaggccgaacagcttgatctgcgactgcgatacgtaaatatcatccggggaagtcaggtagttataatcggaagaacgcaagaaaccatatccgtcaggcatcatttccagcacaccgacacctgtcagtataccgtcaaactcatactgtttttcctgcacagcattgttattattgttgttgcgctggttgttatgattattctggttgttctgtctgttgttattctggcgagaattgttctgctgctgggcggctgcaggttgttcttcccgcgctttcggttccggttttgcaggtgtggaagagaatgggaaaagttgatcgagaactgatttggtatccggatggcggaataccacacgtttaggttcgtctgacggagtcgaagcggcaggagtttccacgacagccggttcttccgtcacttcgggagcgatttcggccggaagctctccgttatccgattccacgacaacaggaggaagcaacggtttctctacaggcttgtcagtcttcttaaccactttctttgctgccggttttaccgtttcggcagggacgtcggccgtagcatcagctacctggacaagagtttcggatacaggagcattggctgaaaccggacttttggaaacggctgcctcttcgtttttctggacaggaacaacagccgcggccactttttctttcttgtcaatacgagtccgtcttttacgttcgggctgttccggagcttccggagcgacctcttctaccgaaacttcaacgggtgtggcgggagcagcgactttcgttttggcatcagcttttgcgcctttcggagccgcagcttttgttttcttagccttagtctgcctttctgctttctttgcttccttttctttctccttttcagcctggatgccggcgtatgaaatggcctgttcgtcaagaattctgtatacaagttcctctttcttaagggaacttacttttttaatacctaactcttccgctatactttgcaactcaggaaggagtttttcatttagttctagaatgttatatttttgcataatgcgaagtgaataataaaaacgacgtacttacacgaccggacacggcacgcgtacaacgcaatcattgtatcttttataatttgataattaataatttcatgtgaaaaccggattgttgagctaatttgaatcattagtaacacatctgcggagtaaatctttgcaaatgtaataatattttcagttactctcgctttttgtcggaaaaaaattcacaactaacacacttttagttgttttgtccaggcaaaaacgattatcggaacgttctcctacaatccagataacagcgcctccgctgcataaaagccacgtccgttccttatctaaacggctgaatttatgatccgagaaataatcgcttaatttcttccgccctttcatgccaaaaggaataaaccaatctccttctttccatgtacgcagggtaagcggaaaagtcagtttgtcgtaatcgaaataagcgatatttttatctttccggatatggaaatcttccttaataacaatcttctcgaaagaaagttcgacaggaccggaccaaactttctcgccaccggtcagtgtatattcacggacctcttcttttacaaggggagataacaataaatagtcccgatcttttatcaaccggtgcgtagaagagaaaaaggttttgcccgattctttcgtcagggacaaataaacatcctccgccaccggacgagtaaagccataggttttgagtaactcgtataaaatagcatcgggcgacgggtaacgcatcaaggcggcaatcgaaaggcggtccccttgctcgaccacggcattcctcgcctcttccaccacatgcagataaacggcttcggctgccgacagatgttcggacgtacgggcgatcgcatccttcacggaaggattgatttcctccagaagcggaaggacacgcaggcggataaaattgcgcgtataagcatcggaaaggttggtactgtcggtcacatacgtcaaaccgcgtccggcaagccactccaagatatcctcacggctcacggcaagcaaagggcgcaccacgaaaccgttcctcggacgaatcccgctcattcccctgatgccggtcccacgtaccagattcatcaaaagcgtttccacactgtcgtcacgatgatgagccacagcgacagcctgcgccccggttgcagcccgttgctcttcgaaccagccatagcgcaactcgcgggcagccatttcaatggagagatgccggtcggctgcatatttccgggtatcgaagtccgtcatcaggaaagggacatccagttttcgggcatactcccttacaaactgttcatcacgcagggattcgtctccccgcaaatgaaaattacaatgcgccgcaatacaggaatagcccgactccaccaaaatggtgagtagggctattgaatctgctccgccacttacaccgaccagaaccggacggttttccgtaagcaaccgatatttctctatatatgcacggacaacgtcgcgcatccgattattcttctatgcctgccaattcagggtcgatcatgatacgaccacagtattcgcaaacgatcactttcttacgcaacttgatatccaactgtttctggggcggaatcttgttgaaacaaccaccgcaggcaccacgctgtacatatacgacagccaagccgttacgtgcccccttgcggatacgtttgaaagcagtcaagaggcgcggttcgatattcgcctccagtttctttgctttttcgcgcagtttctcttcgtcctgcttggtttcggaaatgatctgttccagttcaccctgcttttgaaccaaatcagccttacggccttccagtctttcggacagttcggcgatctcttctttcttacggttgatcgcttcaccgaattcacgaatcttcttttcagagaactcgatttcaagtccctggaattctatttcttttgacaagttgtcgaactcacggttgttacgcacgttatccaactgcgctttatatttttcaatcagaccggttgactccgtaatcttatgtttctgttctacaacagcattctcaaaatctttaatttctgactgatagttctgaagacgtgtttccagaccagcgatctcatcttccaggtcctgtacttccaagggaagttcgccgcgaagtgtcttgatcttatcaatttcagtcatcatcgtctgaagctgatacagcgtagaaagcttttcttcaactgtaatctctttttcagctgattgtttatctgtagccattctataaatattttaccgggtttgaattaacattcgaaaaatgtaccgcaaaggtagggaattttttcgatattatgttataaaagatatcttttgtacagacttcactttcataatgaccaataaccgccagcagaatccggtcttccacatcgtaaaagtcattatatttagcctcccccgtaatgaaaacgtccgcaccgtaactgattgcgtctttgatcaggaaagcgccgctccccccgcataaagcgacttcgcgtatcggcttgccggtcagggcggaatgcttcacgcaccccacttggaacagttccttgatccgttgcaggaagcccaattcactctcttcttcgggcaactctccgactacccccgaaccgacctggttccaggcattatccaatggatagaaatcgaataccggttcttcataaggatggacggaaagcaacgcacgcgtcaccgtcgacttacggaaagcgggcaatatcgtttcgatacggatttccggctccacatgcaactcgcctatttcgccacagaacgggttcgtcccttcgccggcacggaaagtcccgctccccggcaggctgaagctacaggaatcatagccgcctatcgctccggctcccgcattgaacaaggtcgtcctcaccaaatcggcataggcctccggcacgaaagtgaccagcttcagcaaagcacctttctgggggctcaggacacggacattttccagcccgatcagttccgccagacggaagttcacgcctcccgccgcattatcgagattggtatgggcggcatagatcaccaagtcatacttgcaggccttcatcatgcaccgctcgatataggtcgaaccggtcagggatttgaaggctttaaaggccaaaggatgatgagagacaatcagattacaccccatctctatcgcctcgtccaccacctcttcggtgacgtcgaggcaaagaagtgcaccggtagccggctgattcacatcgcctacctgcacacctgcattgtcaaaactttcctgcaatggcaacggagcgtattgttcgatttctttcagtatatccttaacccttaacataatcaataatttataaataaatcaatttgccaataggccagtgaaccattcaccagcataccggcaaatcgacctatcggtatattactccttaatatctactttcaggcataattcttccaactgcgaatcatccagttgtccgggcgcatccagcatgacatcgcgaccggagttgtttttcgggaacgcgatacagtcacggatagaatcgaggccggcaaacaaagagacccaacggtccagaccgtaagccagaccaccgtgaggaggcgcaccatatttgaaggcattcatcaggaagccgaaacgctcctgtgccttttcttcggtgaagcccagcaactggaacatcttatcctgcaacttgctgtcgtggatacggatggaaccgccacccacttcgacaccattgatcaccatgtcgtatgcattcgcacggacggctcccgtatcgctgtccagcaaaggaatatcttcgggtttgggagaagtaaacggatggtgcattgcatagaagcgctggtcttcttcgctccactcgaacagcgggaagtcgatcacccacaggcaagcgaacttgttcttgtcacgcaagcccaactggccggccacttccagacgcaattcgcaaagttgtttgcgcgtcttcatcgcatcgtcgccggaaaggatcagaatcaagtcgcccggttttgcaccaaaggcctctttcatctgctgcaatacttcctgggtatagaatttatccacactcgacttcacattgccgtctgcctccacacgggcatataccatgccctttgcaccgatctgcggacgtttcacaaactcggtcagcgcatccagctgcttgcgcgtataagaagccgccccttccgcacagataccgccgacataagcagcattatcgaatacggagaagccgtgtcccttcatgatgtccatcagttcgacgaacttcatatcgaaacgcaggtccggcttgtcgcttccgtaatatttcatggcatcgtgccaactgatacgcgggaaagcttcttttatatcgatgccccggatcaccttgaacagatgcttggccattccttcgaaaatgttcagcacgtcttcctgttccacaaagctcatttcgcagtcgatctgtgtaaattcgggctggcggtccgcacgcaggtcttcgtcacggaaacatttcacgatctggaaataacggtcgaaaccggaaaccatcaacaactgcttcaacgtctgcggagactgaggcaaagcgtagaactgtccgggattcatacgggaaggcacgacaaagtcacgcgccccctcaggcgtcgagtttaccagcaccggagtttcgacttccaggaatccttgcttatccagatagttacgcacctcgaaagccatacgatgacgcagttccaggttcttgcggacggcgttgcggcgcaaatccagataacggtatttcatacgcaggtcgtcccccccgtccgtatcgtcttcaatcgtgaaaggaggagtcacggcagcattcaggacattcagttccgaaacgatgatttcgatctcaccggtagggatattcgggtttttgctggaacgttcgcgaacggttcccgtcacctggataacatattcgcgtcccagcttatttgctttctcacaaagagcggcatccacttcctggttaaacaccaattgcgtaataccgtaacggtcgcggatatccacgaacgtcatgccacccatcttacgggttttctgtacccagccggccagcgtaatcaccaagccttcatcggcaaggcgcaggtcgccacatgttcttgttctatacattatataatatggattaaactgtttttcttttttacgtgtgcaaagataataatttataggtctcaagaatatttgaaatggcatttaaacgttgaaaagtcgtttctaattttcttgaagccatttttcaatggtgaaacccatctccatttttcttgaaacggtttttcaccattaaaaaggcacttcaagaaatattgaaacggagattcaatagtgaaaaacggcttcaagaaaatttgaaaccgtttttcaacgtttaaatgccatttcaaataaaattgagaggggaaatcaatgcttgttttccagcgtgaagcgcaatgtcccggcattcaccagttcgtcttgcgaaatcgtataccctttcagcttcttcccgccggctgtcacctctttgatataaatatcttccggggttttgcgggcggactcgatcaccaattcgcctttcggatagaacttctcgtccagccggatcgtcaccttgttgaaggtcggagaagtcacaacataatccaggtcaccgggacaggccggatagaatcccatcatcgagaagatcgcccaggtagacatcgtacccgtatcgtcgttacccggaagcccgttcggggcattgtgataatatttgcccaacagttcgcagaccagcttctgcgtacgccaagcctctcccttgaaatagctgaagaggtacggataggcgatatccggctcgtttgccatatcgtagtaccctttgtcgaagaccatctgcaacttatcgacaaacttcttctgaccgcccatcagtttggcaaggcctttgatgtcatgggggacatagaacgtgtagttccaggcgtttccttcatggaaaccggggctcggctcgaagttctccccctgtttcggatcgaaaggggaatagaacgtgccgtcgggcaggatgggacgaagcgtaccgaactccttgcaatagtaatgcttataccccatagcccgctcacgaaacagcttagcgtcttccttctttcccaacgcatctgccaacaacgagagattccagtcggcgatataatattccaaggcatgcgaaaccgaattatcatactgttcgcgcaaggggacgtagcctttgctcatatagtcgttattgtccgggcggagcaggttgaactctccgggagtagtagcgcccttgcacatcccttcgtaggcagtctcgatatcgtaatcgcgcaaaccgcgcatataagcatccacgatataagggatagacggatcgccttccatcgtcagtgtctcgcgtccgtacagttcccacttcggaagccatccgctttccttgtacatgtcgatcatggtgcggatgatgtcgagctgtttttcgggatagagcaatgtcatcaatgtgctgacattgcggtaggtgtcccagagcgaaaagaccgtatagcggtttccggtagtatggccgactttcaggctttccatcatcggatattcgccattcacgtcctggatgatgttcggatggatcagcaggtggtatatggcggtatagaaaatcgtcttatcgtcgttcgtcccgccttccaccatcacacgcgacagatcgtcgttccacatcttgccggctgccgcacgcactttgtcgaaattgaaatccggctgttcggtgttcatattcaggcgggcattttcgatgctgacaaacgagacacccatctttacttcgatcacttcgtcttcttcggtatcatacttgaaccagacgccgatgtcgtcaccgctcatctcacggtcatacttcgtgtacaatttatatttgccggaataggcatcccattcggcttccactcccttcatctcgcgttgtttcttccagtagccggcctgcttgggggctttgctgagcttcatcacgaaatagatcgggaaaacagcctgcgggttatagcagaacgtaccgagcagcttgcttccctctatctccgtatcgctcaccatacgaacggtcgcaccggtttcattcgtcagcccctcacccaaattcaagaggatattcccctgccctttcgggaaagtaaaacgtgtcaggccggtacgcatggaggcggtagcttccgtcttgatgtcatatttcgtcaggatattactgtaatagccgggatgggccacctcgttcttgtattcgctgccgtatgcgtgataatccacattcagctccccggaggtaggcatcaacaacaggcttcccatctccggacaaccgacaccgctcagattgacgtgcgcataaccggtgaagaaattattatccgccgaataaggcgtggaccaccactggctgtccttatcaaacttattacttttcgaccccatcacattgaagggggtaacactcatcattccctgggggcaaatcgcaccgggattggtcgtcccgtagttgcttgtcccgataaacggattcacataatctaccggctgttgcgcggaaaccagcaaagaacagcaacccaataaaaaagaaaacaacaccatcttcataacaccaactcttattttttaattcttaattcttaatttttaattcaccaaacaacgatctcatccgcaaaaataaaaccgggattcgccctcggcgctttcaaacggatataacgggttttccagttaccgtcgaacgtatattcttggaacaggaggtccggatcatcagccggaaccgttgtcggaacaatcccgcgggaaataaagttttcaccatcttccgaagtcaacaactccacttgtccgggctggaacacccccggaccgatcaattgcatgaaacgaatggacactttatggatatccgtatcctcttccatatcgatcacacagtccaggtcatccaaataaccttgccaacgtccgtccagataagtcagaccgccccgatagccgtccaacagggcgttcgttcctccggccatatagccttcgtagagcttactattataatgtataggcttattgatggcccgatgataatccactttcttttccgtcggtgtcccctgaagcacaccgtcccggaaaatagcggctttgatatgggcggaatcttgcacggttatcggcccggcataaagggcggaagatgccaccggaacggaaccgtccgtcgtgtagcggatttccgccgggtatttctcggcatccagtatgacttctatctctctgcctgccgtatcgacctgcatggtcacttccaattcgtccgaaagggtaaaagtacggatccccattccctgcaatttggaaatatgcgcattcatgcgaggtttgaaatcctcccatgtccgtaattcctgcggcgtccatccgatctcggccacagcaagggcacgcgggaacatcatatattccagatgttcgggtgtctggatatattcggtccaggtattggcctgcacccccaaaatatgccggcattcctctgccgtcaacgaatccgccgggacgggatcatagctatacactttctttatcggcgtatagccgccgatggcatacggctgtgtcttcggatcggcctgatagaaatccaaatacatataattgcccggtgtcatcaccacatcatgccccatccgtgccgatttgattccaccgtcttctccccgccatgacatgacggttgcttcgggagccagaccgccttccaagatctcatcccaaccgatcagcttgcgatctttcgaattcagaaactcctcagccctgtgaatcatgtaactctgaagctcgtccacgttcttcattcctttttccttcatcaaagcctggcatttcggacatttcttccaggcggacttcccggcttcatcgccaccgacatggatatattcggacgggaaaagatcgatcacctccgccaatacgtcttccatgaatgtaaacgactgctcgttaccgatacaaaaatcgccgttctggtaaggctttcccgaacagctcagttcaggataggccatcaggacctcttccgaatgccccggaaattcgatctccggtattatgtttatatgtttggaagccgcatgtttcacgatctcccggatgtcctccttcgtatagtaaccgccgtaagcacccggcgtcccttccggcagatacttacggtcgcggccgtcccaccacttccgccaatcagattcggtgcggaaggccgtttcagaagtaagtttcggatatttgtctatctcgatacgccatcctccggcatccgtcagatgcatatgcaaggtgttcagcttgtaaaaagacatcacatccagcaatttcatcacttcctctttggagaagaaatgacgggatacatccagatgcaatccccgatacccaaaacgaggattatcccggatcgaaacacatgggacctctcctccggcatagagttggcgtaacgtctgcatcccatagaacagaccgtccggcgaaccggcacgcaggtcgattcctcccggcgtcacatccaactgataaccttccgggttaccggaccaggcttcatcgatcactgttttgatattccgggaagattgcccgccaaataacgcgagactatcgaccgtgaaagttcctccggtcattgtcatctgttccggtttgggaataagattgacctgccggacttcctccggagagcaggcaatcaatagcaacgagcaagcggcagccagcccggttacataattgcgagactgttttggcagtaacataaatatttagtttagtgtgtttaattcttggagggtaaatatacgaagaaaaaacggacaagctcctatttcaaacaaaaagcgatgctttagctcccctaacccatagcgttacaccgtctaaaactatgcttgacggggcacaaaaaaagaggatatgcctgttctgacatatcctcctatgtaaagaaagccgcaccgtagatatgaacaaactccgtatgacaggatttgagtgctttgccatctttgtaatccgccgtgctaagcatgccccgaagggtgcggcccgccattgacgacaagagctgtgtctcggaattaaaataaactgatgagtttcccaatcgaacatgtgcggctaactcatttttcttatcacaaagatatgcaataggaatgaaaccaccaaacttttgacataaaaaaagagctcctgaatggagctctttttccaattgctctataatgtcaattacttcactttagcaacgattgctttgaaagcttccggatggttcatagccaagtcggcaagaactttacggttgatttcgatacctgctgcatgcaaagctcccatcagacgagagtaagacattccttccagacgtgcggcagcattgatacgctgaatccacaatgcacggaagttacgtttcttgttacgacggtcacggaatgcataagtcaaacctttttcccaggtatttttagcaacggtccacacgttcttacgtgcaccatagtaaccacgggtaagttttaaaatccgttttctttttgctcttgaagcaacatgatttactgatctaggcataatactaatctgttttgaatgttagcgtcatcactatcggatgatcttatttgctaaatacattcggttaataaaaatcttgtaaaactcgcttaattaaaaaagattacttcaaaccaagcaactgcttaacgttgcttacgtccacactggcaaccaaacctgtgtgagtaagatttctcttctgctttgtagtcttctttgtcagaatgtgacttttaaaagcgtgttttcttttgattttacctgttccggtaagagcgaatctttttttggcaccggaattagtcttcatcttaggcattttccaatatattttaattattaaactttacaccctttagcgggtggtttctttccttatcattcagactcttcagtcttgggcttgggagtcacgaccaccttcttcactaccggttttgaaacggcaggtttggaagtggcggcagctccggctttcttcggtgtcagcatgatgatcatacgtttaccttccagtaccggcaattgttctacctttccgtattcctccaagtcattggcaaaacgaagcaacaatacctctccttgctctttgaaaagaatggaacgtcctttaaagaacacatatgcttttacttttgctccttcttccaaaaatcccttggcatgtttcaacttgaagttgtaatcatgatcatctgtctgaggtccgaaacggatctccttcacgatcactttcacagatttcgccttctgttccttctggcgcttcttctgctgataaaggaatttctgataatcagtaattctacaaacggggggcgcagcattcggtgaaatttcaaccagatcgagcccttgatcttcagccatctttaatgcctgagaagtaggataaactccctgttctacgttatcacctactaaacgaacttcacgaacacgaatacgttcgttgattctatactgttctttcagactgtcattcttcattcaaaaagatttattctcctcgttattagttaattaattattatctttcttccagtgattcatctgatcctctacctcacctttcaaaagcgctgcaaaggtagtaattttcatcgaacctttatcaccttcgccctgttttcttacagaaacttcattattttctgcttctttctctccaacaatgagcatataagggatacgtttcaattctgtatcacggatcttacgaccgattttctcattacggtcatcaaccagaacgctcagatcttcggcttcgagctgacgttttacctcataagcataatcgttgaacttctcgctgatcggcaggatcgccacctggtccggagtcagccacagcgggaacttaccacccgtatgttcgatcagcacggcaacgaaacgttccatagagccgaacggtgcacggtggatcataacaggacggtgtttcttattgtcctcacccgtatattccagttcgaaacgttccggaaggttatagtcaacctggatcgtacctaactgccaacggcggccgatggcatctttcaccataaagtccagtttaggaccgtagaaagcagcttcgccatattcaatcttggctttcaggcctttttcctgacaagcttcgataattgcgctttcggctttctcccagttttcttccgaaccgatatatttatcccggtttaccttgtcgcgcagagaaatctgtgcttcaaagttttcaaaatccaaagccttaaagatgataaagataatatccatcaccttcaaaaactcgtctttcagctgatcgggacgacagaacaggtgggcatcatcctgcgtaaagccacgtactcttgtcaaaccgtgcagctcgccgctttgttcataacggtacacagtcccgaactccgcgaaacgcagaggcaggtccttgtatgaacgcgggaacgatttgaatatttcacagtgatgagggcagttcatcggcttcaacaagaactcttcaccctcctgcggagtatggatcggctggaacgaatccttaccgtatttagcgtagtggccggaagtcacatacaactgcttgccaccgatatgcggagtcatcacttgctggtaaccatatttcttctggatacgtttcaggaagtcttccagtttcaggcgcaactgcgtgccacgcggcaaccacaacggaagccctgctcccactgccgtagagaacgtaaacagctccagttctttgccaatcttacgatggtcacgtttcttggcttcttccatcaatgccagatattcgtccagcatctttttcttcgggaaagtgataccatacagacgaaccaactgtttacgcttttcgtcaccccgccagtaagcaccggcaacactcattattttaacagccttcagataagaagtgttcggcaagtgcggaccacggcacaggtcggtaaacgccccctgcgtataggttgtgatcttaccgtcttccaattcgctgataagttctgttttatattcttcgcctctgtcaccgaacattttcagggcatctgccttcgaaatgtcctgacgtttgatttcctctttcttcgctaccagttcgagcatttttgcttcgatagcagggaaatcaccttctttgattgttgcttcacccggatccacatcatagtagaacccgttttcaatagccggtccgataccaaacttgatgccgggatataactcctgcaaagcttcagccatcaggtgagcgctggagtgccagaatgcatgcttaccttcctcgtcttcccacttgaaaagtttgatggcggcatcctggttgatcggacgggtcaagtcccaaatctcaccattcacgctcgcagccagaacttcctgtgccagacgggaactgatgctttccgcaatctgcatggcagtcgttccttcggcatattcttttacggaattatccggaaatgtaatctttatcataatctgttcactataaattcctaaaaattaatcaggatgcaaatttagcattctttttttgttaaacagaacttttaggaaaaaagtttctgctccgcaaccttttatacaaaaagaggaccacgacaaacaacagtattcctccatagataaagtatactggcgaacgagctttccggctggattccatccggatttcggcaacttttacctgctgtccggcatattcatcttgttttcgcaccatcactttcccggtgtcggccagtgccctccggtaatccatctgcaaagaggtgacagttttcgggtattgcctaccggtactgtccggagcgaaataaacaacccggtgcaaattccacactgccgtatcggtcaaatgaatatcccttttcctcaaattcgtctcacatgaagaaaatcggacagaatccatagaagtcgccacctcccgcctctggcttttccggtttcccccacaccccgataacaggaataccagaaccaaaagacgcaaaagtacctgcatccggttcgtaccggttttctttagtgatacatgtagaaaattccgcttccggtaatgaatcgcctggtcaaattcaaaccccgattgccgtaaaacagctaatagctccgccgtatccggcacatagcaatcagtagcctctatttacatagcctatttcgaatgtttatgccaatgaagactcacatattcgtttataacttctcaaatatcctcttccaacgaatcgatttccaaccgcatttatccgaatcaaaggaatacagcactctatcgaactttccgacgattgcatcttccgaaatataaccgaagtaacggctatcgtgcgaattatcccgattatcaccttccataaagtagaacgtatgctttgtaatataaagcgaatcgcatttgccattgatgaagatacgattccgatatttcgcaatagaacttccttcccgaataattaaagagcgataagaatttagtgtttctttattaatggctaaagtatcgccttgtggtataatatgggtgatacgttttaccagccatacgcgctcatccatagggctgttgaacaccacaatatctcccaactgtggctgggtaaaacccggcaagcggaaatacttccaatggttctgttcatctgctatacggagcggtcgaatccatgtgaatacattgagcaacggaatatctgcccaacgtttcgggagtcgtcctccgtatgccaacttatttatccataaacgatctccgcaaagcaaagtgggttccatactaccggatggaaccacacacggcttgccaaccgcgatacggataaatacacagacgaaaaccagtagaatagttccttttagaattcgcattttattttttctatctgatatttatttatatctttatgtatgttaaaataacaagatttattgcacataccctctttagctatgaaatcggatatatataaagcatagcccggagccagctctttcatgcttgccgtatcctttgtatggcaaataataagagtattggtgcaattatatggctgattgctgttcaaggcttctatcaaatgaaaataagtacttatagtagtatcttcaggaattaaaacggcatattcataacttgatttccagatagaatccaattcagcagattgaatatatgcttgatccggttgttttatggcaattgtgtattttcgtgaaaaattccagttgaaatcacatctggtaaatatcaatcctaacgcacaaagggataggagtagtaagtttgttcttttcatgttatttgtatttattgttaattgagactccattcaccgaacatattcgagcaatacttttgatataggaatccgttatatcaggtttcgacttttccggtaagaaaaagtcagatgcctttttattcggatgtaaaacaaaataataaggaacttctaattgttccacataccattcatacatgcaatcataggatatattaaaaaatgtaacgtctttgcatccttttgtgcatagaatttttcttgctatggaaggattattatacgttgtcaagataatacagtttacaccattttctattaaatccctaactcgatccaactcattgaatatacatgattggcaactcgtctccttgattcgaagcattaaagtaggagtctttaaattccttataaataaggatagactatcattctgtaattttttattgtctggaaattcttgccattgtgtattggcattaacttccatatttcttaacatcacatacatctctgtattatccatgtcgttgcttatattgtatcgattattgtagaataaaacaccagctataatgacaattatgatggatatgataatattagctatacttactttcttcataacgtctttactttaaagaataccaacaccatattatcatcttctttcaagctctctatcattatccggttttcctctttcatcggataatgcgttgtagtttctatatgcttctttaaacctttcaatgtttccggttccactaaagccacaaaatagtctttatagctgaatatattattcataaattctaaggcaaaatccatatcgtaataaatgtaataccagctgatcatttttttacttcgtttgtcgtaaaaagatacaaaatctttcccatcttcacttgaagttttaagaaataggtgcgtgctgttttcagcaaaaccggataaataagtatgagaagaacaataccgataaaagtcctcatagttttcgaaagcctccaagtctttttctttaaacggactgaaatcgctataatcgaatttatatctcatctcaaaaatagaatctttcaatgtatatactttatccctatacaacgagaaatacaacaattcatcatttgcccaaattaacggatcataaacaatcgtagtataaactttttcggggaaggtgtaagctgctttcaatagtctgcctaatgtgtccgtatagagaactttataatcagcgtatttccctaagtgataatttcggtcgcctgcatcagtaaaggagacatattctccatttggaagtatctgaaaacaacttttcattctaaagttaacatcatacgaagtaataaaatctcccttatccgtaaataccatccatttacgtttttgattgtcatagatgacaaattgcttattagtcctattaacggcaaatgctttaggagcataaaattcgtaggaagcaccgcccttatctcctacataattcaagaacttgccatatttgtcgaatataaacaatttctccgcacccaatctatcaaacaaataaatcttatcctcataaaactccaagttattgcaatatgcaaataatgattcatcagtcgtttccaatggaatgtaatagaagtcctctattagttcggaagataagactttactttttacattatccgatacttttattacttccgcgtgttcctcatcggttggaataaccgttacactatctgtatttacttcaggaaaaggtcgtccttttcttattgcttcttggcagctacaatataaagtaattagtcctaagaaaataatctttgctttcataatatgaatttttataaagtagagttacgactaataagagcctgtttaaatttctctgaaataaattttgcatagccctcatcggcctgctttattgcattataggattattttgaaaaacaactgtcatactatcactaatttccttttatcaattgaatatcaatagacacaagcaatgatagtaggtatgacggatgcctattccatctatcatactatcactaaccgcctgtccaagattcttcttcacatgacttattttcaataacataataagataaacccattgacacccgggtctcgatatcattcacactcgggtgtcaagaccgttcacatccgggtgtaaaaagcctgtaaacgggaatcttcggcactttttctgactgtttgaagcaaaataagtcacgtgtttcaacaaaaaagacggcatctcctacagaaaaacatcctcaatacaactctcacaaccaacaaatgcaaaatttaaacaggctcttatatttcaatcataaaattcattacctcaaacacaagcttcacttgattccttattttaatctattcattcacttttttctcggtcaataactattatgattggctctttttacaaaaaaagcgataatattttaatttgaatttgttgtttgtgtaaaatttgttaatatatacgtgagttcgatgcaaatgatactggcaaaggacaacggttactttcgttgtatatttgtatcggacattttagaaacaaaagaatatttgtttttgacagcaaagcaagatgtatattcttatctgcttcgggttaacaaagaggacggttctgttacttctatttgtaatggtggagaatttaaagaatgccctggacaccaacaacgagaaagagatcatggagcacctgcaccggttttaccggggccgcacggtggtcgtggtggcgcaccgtttgagcacggtcagggatgcggacaacatcgtcgtcctggacaaagggcgggtagccgaggaggggacgcacgaagaactgacggcgaaacgcggaatatattacaaattggtgaagaaccagttggaattaggcaattaaatgatgatttaccggtaaatcatcatttacaaattgtatatggaaaaagggaaagacatagaattacgcagtgaagcggtgcaggaagtgatggggcataatcttgatatgttatgtaacataagactatttatctgatagtaatgatgttctttggttgcagattttttattgcaatatctctataactggtccatcctttcttgatttcacctgtatgagtgacaccctcctgaggtgccatcaattgtgaggtgttcggtattatagaaaaacacaactttctctacagctgctgtaacctccttgatatcataacacacacttacccttaagcagtttattcgtaagcattcggtaaaccacgtattttttcctcaaacttccgttattaactttacgtccaaaaagcaaagttatgatgacacgagaagaagtagtagagataatgaactactgcaaagagcacaaagtgacttataagtcaagattagaggaactcaacatccctgtatggcggttttacgacagcaaatcccgttatgccgccgagcaatcatcgggtaaaacggctcaaggtgagtttatcgagcttccacacagcggatcttttgttccggttccttcatttgccggtacaaccggacggaaacagaaaaatacaccggctacgccaagcggattgaaagagatggaaatacgtacaccggccggtagtgccatacgcattgcggtgagctaaatgaaaaggaactgttttcaatcatccgggcctgcaaccatgttcagccttaatgacagtatgtgctatctgttgtataaccgcccgactgatatgcgcaaaagcttccataccctcagcggtatcatcaccgacgccatggggcaggacccctgcaacggcaacgtgtatatcttcataaaccgtgaccgtataaaactcctgcattgggagccaggcggcatggtgcagtattccaaacttctggaagccggcactttaggcaagtctgattctgccagcgataatgaggtctgtgcaaatatagaatggcgggaacttgtcatgattgtggagggtatcatggaagcctgcgattcgcgacgcacgagacttgaaaacctgcaaaagcttcgaaaatagtacctttttttactccgttcacttttgtatgtcattggatttcttcataaccttcctgttgagagaaagtaactttttcaacatccgaattgagttggacgagatgcaaagaaacattatccatactggttaagcatgataccatttgccggatataagttccaatcccatataccgcagcccggcttcaatagctataaaagcattcgttacaatatgggctttatcaaaaatacgggcatgttcttccggatcggaggccaaacaacaaaattcattttccaacaaactatccagcgcatctatacattcataatccaaatcagcataaatacctccatattcatatagaatcaaataacgaatcatatcccaacgctgaactgcatacggataagaattatatacatccctatattcggcatgtccagccataaaggcatcgatcttctcgccattccagaaaatgtacgtccaatccggatgttgctctttccatgtttgagacaaatccgacaaaagatccggttgtggaccatcctttccttcccacacttaggtgtataatctttggtatctgcatattttatctaatttatacccgacactataatagcactaaactacgcaaaaaccattctacgcctcaatttttgttattatagttagattcaaatatatgatttcttttacaatctgtaacacaaaatcttatgctatacaatagacatacacaaacgagatcttacttattgtcaaaatttccgaaaaagccattggttcaaatcgaaactaccaccgcatctaatttgattttataccccatataattcaaattacacacaagggtgtaatattttttaacaaacaacatattccatatatgcctactaatcacagatttacaaaatggctctatttcaggaggggatattgtctatttttgatacaaacttagagccattttcctaacgtacgctttgcttgctttccttattttaggcttaaaaacagcacgattccgtaccgtcttcccaggatcatctaaatgatttttcaaatgatctgaatggttttggaaaactatccagacaatcgggacaaacgatcaggataaacgtacggatgtaagagaacctacgagtggcaactctaacaaattgtcaatcgtaggtccgctatttaaagatatgctaatttgccaacggaaaaagatgagcgatcgtgttcctgccgccaacaagattcaactgctgctcgccccagacaaacgttccgctccgcaaagccggtaaaacgatatggccggaaagtcctttgccgtttttcttcaaactgacttcgataagccctgccgggtgagggctctttccttctatctccgcataccgatcggccaaaccgacctttttcaaggcacggaacaggtaaaagcgatagtagaaggtagcctggatcagagaagaatcccaaacaatttagatacagaagattccaatgctgcattacatccattttttgaactaaaagctacacatattttatctgccaatttatttttcacatccaactgttttaaaacaaggagataagacacatatacacctaaaaaattaaatggtatagtaaacagaaaatctaatccattcgtcagagtattaacacctaaaaatagaaatacatagaataaagaaaaaaggaaaataaacttatctgtccttcggaccctgtttctcaaaataccgtaccgccaccccgatcaccgaatccgacgtatgttccacataatttttatcccgcgcctgcgtcatcagcagacaccaggtggcatagtcttcctctgagagtttttctggggacgggatggcctctaaaaggattaaagaactgtccggccggctccccattaaggtttccgcctcctgcaaaaggggttggatatggggatactgccggcaagcaatcagacagaaggctaacgagaaaaatataacgtatatgtttctattcattattatagcgtgtgttctaaatgcaatattacgaatagcctctcttattcctctgttttttgttgacaataatacatattagtgacaacaagcggttttatttatcaagatttttacaataacccctgtttttcctatttcgagagaaaacaaacacaatttcagccgacctttcttccacctaaacagtgcttttcctaacataccagcgaacagtccgccggagaggtagaaattgcatgacatttggttatcttatcttccatattccttacacttcgaaaaaccggaactgccagtgagttgaatatttgggaaaacaaagggagggtaaaggaatattacccggattcgaagggtcttttcaaggaaatcgaacccttatttccacgacgaccgtcttcatcgctccgggctgtcggattcactctatacgaagtcggacttcgtggcgatgaagacggtcgttgggaggaaaaaccgcgcacctcacgggaatggcctcccaaaggcattattttcgatccgtaaacaactgttcgaagaacatttggcggatgaggttcaagtcattttcaagatgttttttacaataaggggggatcaattgcttgtcatacgcttgataatactataagcattgatgatacccaactctccggccttgctcaaatcggcgattccccggttggcatctccttgcgaaaggcgtgctaatccacggttgaaataagcctcggcaaattccggatcacgctggatcgcctcgctgtaatcctggatggcagcacgaaaatcgcgttgcgcacaacgcaggtttccacgattgaaataagcatatacgaagcccggattcaatttgatcaccatgtcataatccctcgtaatcatttcatgctcgtaagctcgcttattgtctttcaaggatgcggaagccggatcagatgttgccggagtacgaacaaccgtcggattcttacccatcttaaggttcatgctcatagcagaaaaatcgtcttgcgagctggcagcctgcgacatattatagtcaagctgtttataccggacgacagcccggttaaaataagccatagcaaaatccggatccaattcgatcacctttgtataatccttaatcgcttcggtaaagtcctgtacaagcataaaatccaaagcccgtccgaaataggcatccacatcgttcggattcttcactatacgggccgaaaaattatcgatagatgcaaaatgtacggcaacctggtcttccgtaagggcggcttcttcgtttgtgatacgcagcttacgttccagtaccagacgggaattgtaagcttccaccatcttatcataataaaccaacttctttaccggatcgactttttcgtaataagtcaggacaaacatcggttccagatccacacgcacattgcggtcctgcacgcgtccacgaatttcgctgttatacttcgtcttacgtacctcttcttcatcatacacgacaagacggttgaacttatcgatattcttatccgactgttcacgcgtattttcatcctttgatgccggatcggccaattgcgtaccggtattgttgccattttgggaagcgaccgcatttcccgaagcattcccgttcttctttttttgctccatattataggcagtccagtagtcacggtcggcaccgacctcatcatgcattttccgcttcacttccgcacggctgtaataaccggccacaaaattcggatactgccgcaacacgacatcgaagtcatgtacggaaccttgataatctcccgtctcgtaacgcaacaacgcccggttataataagccatatagttgtccggttcaatctcgatcacaacatcgaaatcttcgatagcccggttgttatccccgatctgtgcccgaagcaatcctcggttgaagcgggcaatcaggttgtggctgtccatgctgaccacctgatcataatcagccatagcaccacgcaaatcctttaactgataccggaccagacctctattgatgtaataaccgctctcacgggtattcagacgaatggcctcgttcagatcggcaagcgcgtctttcatattgttcatctggtaatgcaggatcgcccggttgccataagcgggagcatagtaggggtccatactgatcgccttatcatagtcggcaagtgctttgaccgtatcgcctttctcggtgtacatcgcaccacgcgtcagatagttcatagaatatttgggatgggccgccatcagttcatcaaacaccttttcggcctccttaaaatcttttttctgaatattggctactgccatattcaccaacatctggcggtcttccgccttaaactccaaacctttcctgtagtcttctattgcttcgtcaaatttctcctgactctgacgggcaataccacgtgcgtaatatgcctgtaccaggaaagggttccgttcaagacaaagcgtacagtcttcttcagctcctttataatcatccaaattgatttttgccacagcacggtagaaatatggttcggccaaccaaggttttgatttgataacctgattgaaatattgtatcgaaagaacatagtcctcaaaatacaaggcgttgcgcccgatagtcaacacacgatccgtattgatttgtgcaaacatggctaacgaacacagctggaatataaataaaagaatcgctttcttcatctattataaaaatattcaacattgatcggtcgcaaaagtaagtaaataatcttagccattaaaaccaatctataaaaaaagctttcacagactgtaaaacagtgtgaaagctttctatatttacttatttcagctatttacttcggctgaatcttaaccatcaaatggtcttttgggatcttatctccttccgttacacccagctcgacaatcgttccggcaacgggagcgaccacccggttgtacatcttcatcgcctggtgaatcaaaagcaactggccggcttcgacttcctgcccttgctgtacttccactttaacgatcgttccaggaagatgagaaatcacatcaccgacaaagggcttatgccacattttacggttcttatattttgcagtcagcgtcgtcttgtatttgcgggccgttactacaaaatccacatattcgttatctttctctttcttttccatattcaaaagtttttacggcgttaattagaacggaggcaatccgtgcttcttagccggtctgtattcttctttcaatacagaaagtttaagcgcgtgaagcaacaatgaacgtgtttctttcggctcgataacagaatcgatgaaccctttggacgcagccacataaggatttgcaaacttctcgatatattccttcaccttttcctggcgcattgcattctggtcttcggcttccatgatctccttgcggaaaataatgttggccgcaccttccggtcccatcaccgcaatttctgcactcggccatgcaaacataaagtccgcccctaagtgacgagagttcatggcgatataaccgccaccataagccttacgcaggataaccgtaatcttgggaaccgtcgcttcggaataagcatacaataccttcgcaccatggcggatcacaccggcatgttcctggtcgacgcccggcaaatagcccggcatatcttccaacgtgataataggaatattgaaagaatcgcagaaacggataaaacgtgcagctttatcggcactgtcgcaatccaatacacctgccaacaccatcggctgattagcaacgaaaccgacagtttcaccacccatgcggccaaaaccgatcacaatgttggctgcccacaactcctgtacttccaagaagtcggaatcatccacgatacatttgataacgttacgaacatcgtacggctgtttcggatctgccggaaccacatcttcgatgttcattaccgcagcgggttccttcgactctaccactttagcacgttcctggttattccaggggataaaactaaccagacgtttaacttgctcgaaacactcctgctcgctctgtgcgtagaaatgagcattaccagttgtttccgcatggacacgtgcaccacccagatcttccatagaaatatcttcgcccaacacggtcttgatcacattcggacctgtaataaacatcttggagatattctctactacaaatacgaagtccgttaaagccggagaatatacggctccaccggcacaaggtcccaggatcaacgagatctgaggaataacaccggaagcaattgtattgcgatagaatatttcaccataacccgccaatgcacctacaccttcttggatacgtgcaccacctgagtcgttgataccaataatcggacatttcattttcagagcatgatccatgatcttcgtgatcttacgtgcatgctgcaagcccagtgaaccaccggcaaccgtaaagtcttgtgcatagatacaaaccggagcaccgaagatcgtacctgtacctgtaacaacaccatcacctggtaaatctttcttatccatgccgaaatcacgaccatcgtgcttcacgaacaggtcatattcatggaaagaattcttgtccaacaaggatagaatacgatcacgggcagtcagtttacccatcgcgatctgcttttcgatagcagcttcacctccacccatctcaacgacggctttcttttccctgagggcctgaatgtttttacttaaatctgtcatactgattagttaatagagttcttattacttaccaaccgcttttgctttataggagcaacgggctgtacctttaataatactatttagtttgcttttattcaactgacggcggattcctgaaatattatctatgaatacatggccttccaagtgttcacactcatgctgcacaacacgtgcagcaaacccctctaccgtttcttcatgttccttcaagtcttcatccagatatttcacacgtacttttgctgaacgggctactttctcatgcacccccggcaggctcagacaaccttcctccatcgaaacctcttcttcacttttttcaaggaaaacaggattgatcatcgtacgcttgaagcctttgcattcaggaaaatcatctcccatcacgtcagcgtcaattaccaaaagacgcaatgacaaaccgacctgcggagcggccagccccacaccatcggcattgtacatcgtttcgaacatattggctaccaattgtttcagatccggatagtccatcggaacctcttcagcctcttttctcagcacgggctgtccatataaatatactggtaaaatcataacttttataactgatatttcttattttccaaatatgactgcaagataataaccgcactgatctcgtctaccaatcctttatcttgccttttctttttcttcaatcctccgtccagcattgccttatgtgccaaaacggaagtaaatcgttcatcgtaatactctaccggaatatccggaatggtccgcttcagatgtgttacaaaggcttccacgtatctcatattttcagaaagttcgttgttcatctgctttggaagcccgactacaaaccgttcaacgggttcgcgcgaaacataatcagccagaaaccttgtaagttcaccgctcggcacagttgtcagtccgtttgcaatcatctgcaaggtatctgtgaccgccagaccggtacgtttccggccataatcaattgctataatccttcccatcgggcacaaagataacataaattcagtttccaattacacatatatacaaaaagtgtgcaatttaatacttagtatgcattcttttctcccttgaacatattgataaccgttacaactataatcttaagatccaagaagaaagaccaattctcgatataccagacatctcgcttcacacgtccttccatttgttccaacgttttcgtttctcctctgtagcctgttacctgtgcccaacctgtcacccccggtttaaccaagtggcgaaccatatacttgtcaatcaacgcagagtattgctctgtatgtttcagcatatggggacgcggtcctacaactgacatttcccccctcaacacattaataaactggggaaattcatccaaattagtccgccgaagaaaatctccgacctttgttttacgcgggtcgtccttcacagcctgcaaggaatcagcctgcgcgttaaccttcatcgtgcgaaacttataacacctgaaatcctgtccgtacagtcccgttctcttttgcttaaataagatcggtcccggagaactcagcttgatcatgataccaaccacaatatataatatcgggaatatagttaccagaattacagttgaaaaaagaatatcaaacgcacgtttcaatgctcgattgtaagctgcctgtaaaggctcgcggcgaacggtcatcaaagggatggactccaaaacatccatcacaagactcttcttcaaatttcgataaaattccggcacaatataaaaacggatcatgtgcttctccacaaaattcaacaaacgcacaatcttctcatcattcgtacccggtaaagtacagtagatttcatccacatcatttgccagcacaaaattctctacctcattcgtcattcccaaataattcggcaaaaccgatttcaaggactgattatcatcaaagaatcccaagatattgaaaccatacgacaaatcatccttcattaccttatataattccatcccattttttcctgctccaacaattacgatctttttaaaattataccctttccgacgatacattttcaatgttacacgcacaataacacgccacaaagaaaatactacaagcgtaacagcgtaataaatcaataagaaagttgccaacacatctccaacattcaaaaaaatcagacaagtggcaaataaaaagaacataatcgtaaccaaaaagaatgctctttgcacaattttatcgataaagacaatggacagatgcaaccgcaaaggaacaaaataaagggaaaagaaataacaaaaattcaacaaaagcaccacttctcgcaagcttccagtaatagctaacgtatgaatactattcaatccataatagacaataaaaaagagaatattcagaacgatcagatctccgatgcctatcagccattgaataagataaccatattttttatttgactccataacaacgcgctaaaatcatgcaaaaataagcattatttccgagcaaaaaaaaggctgcacacgattatgtacagcctttcgggatataattaaaaattaattatttgcagacatgataacaacgcggttccaattgttttcattgtacggttgaacgtcagaacccttccattcgattgtgatctggctagaagagataccgtatttatcaataagttccttggcaacggctcttgcacgtttttcggaaagctgcatattgtaagaacctgtacctgttttcttatcagcatagccgataaccttgataggcacattgttttctttcataaactgtgcagtattgaagatgctaacctgctggttcttgtcgatcttagcgctattgatacggaagtataccacattatctacatagttgttaacaacgttagttacaacttcttcacattcaggacaagaaaccggacgtttactcaattcgtcgttttcagcacgcaaagcgttgatctgaccattcaggtcgttcaacaatgcataatccatcggctccaacacttcgaaatcagttttacccagtttgaatgtcaaaccagcgctcaactgtccgataccgtcagtcaggtggtacatagaaacacggttaaactgttcgttcaacaatgaaccctgaacttctacgttcaaatctacacgtttgctcaaacggaacgcagtcaggataccgaaattcaccgttggagattctgttcttgcaatacctctgttatcatcggagtttttgaaacgctgtgcgtaaccaagacctacccaaggaatcaaacgaaacactttcttttcgttgtaaggagcccagaaattagtcacatcccacaacaaatcagcatgagcagctgcatatttattgtgctgcataaatgtagcacctgtgttttcaaaaccatgcaacacaccaccattcaactggagacgcagggctaaatacggattaaaccatttaccgacagagaactgaggagcgaaattcaaacgattcttaaaatcggcttcactgttctgatcaccaaataaaacactcgcgccaccagcaatagagataaaccagttgtcgcctgctttgttctttttgaagtttgtcttataacccgcttcgttactaaatccaacctgcggtttaaattcctgtgcagacacagagaaaacaaaacctgataacaaagctaaaagtaatactttagtcttcatattcatcaacattttaattaaacaatcaattacctataatcttgctcaaacatattgcaaaattaactctttttctaattataacaaataaaaacaataaaagttcgattctactcaaaataattcaatacttcatagccaccttcttttagatacgattctttcttcatcaattttatatcattcaacatcatatcctctatcaaagaggccaaatcgtactttggttcccatcccaaacgggtacgcgccttcgtcgcatcgccgatcaataaatcgacttcagtcggacggaaatactgaggatcaacacctacaacttcatctccaatccgtttcctgaaattatcgagataaagctcaccgactctttcaataaacactttttcgtcaatatagtttaagacagccacctcattaacattctcacctttgaaaataatttccacgcctatctcggcgaacgccatcctcaagaaatcacgaatagttgtcgtaatccccgtcgcaatgacataatcggacggttcatcctgctggaggattgcatacattgcgcggacataatcttttgcatgtccccaatcacgtttggaagaaagattccccatataaacttttttctgcatgcctaaagcaatacgggagacagcccgcgtcaccttacgagtcacgaaggtttctcccctcagaggagattcatggttgaacaaaataccgttcgacgcatgcattttataagcttcacgatagttcaccgttatccaataaccgtaaagtttggctacggcatacggacttctcggataaaaaggagtcgtttctttctgcggaacttcctgcaccaaaccataaagttcggatgtagaagcttgataaatgcgcgtcttggggatcaaattcagcagacgaactgcttctaagatacgcaaaactcccagaccatcggcattagccgtatattcgggtgtatcaaaactcactttcacatgactcatggccgccagattataaatttcatccggctggatctcaccgatgatgcgagtcaggttcaaactgtcggtcaggtcaccataatgtaggatcaagttacgattttccacatgcgggtcctgataaagatggtcgatacgatccgtgttaaacatggacgaccggcgtttgataccatgcactatatatcctttcttgatcagatattcggccagataagccccatcttggcctgttattcctgttattaaagcaactttactcatcgttgttaaacggaagacgcaacgacctccctatttttaattttttaattttcaattcttaattctccaagtaccaactataaaggcgttcaaccccttcgtctatctcaatcgtatgatgccagcccaaagcatgcaacttcgtgacatccgtcagtttgcgcatcgtcccgtccggtttagacgaatcaaatacgatctcacctgtaaaccctaccttttctcggattagggaagccacttcacaaatagaaagttcttttccagtacctatattaatatgcgtatttcggatatcgccggtagcaggacggagatcggcaaaatcgaccttctccatcacatagacggaagcatctgccatctcctcgctccaaagaaactcacgaagcggtttgcctgttccccacaactccactttaccaggataaataccgtacttggcaagaatatccaatatttcggattcagaagtaccgccggatatattttcaaccgaacgcgcattcagatctttccggacagcctcccaatctccttcggaaagacatttacccaaatgtactttgcgaatcatggcaggcagcacatgcgaagtctccaggttaaaattatcattcgggccatacaggttggtcggcattactgcgatatagttagttccgtattgcaagttataactctcacacatcttgatcccggctatcttagctatcgcataaggttcattcgtatattcgagaggcgaagtgagcaagcaatcctccggcatcggttgcggagcatttcccggataaatacaagtacttcccaaaaacagaagtttctttacattattcagataagaagcatgaatcacattgttctgaatcataagattctcgtaaataaagtcagcccggtagcggctgtttgccacaatccctccgacatgggctgctgccaggaacacatattccggcttctctgcggcaaagaaatcatgaacggcctgctgatcggtcaaatccaattccgcatgcgtacgcaggacgaagttcgtgtaaccttttgccttcagattcttcagaatagcagaaccgaccagtccccgatggcctgctacaaatattttactatccttattcattctctctttttatcaaattcagcagatattgtccatactggttcttcaacatcggagcggcaacttgcctcaaccgttccgcatcgatccaaccattccgataagcaacttcttccaagcaagctattttcaacccttgtcgtttctctatcacctcaacgaaggtggaggcttcggaaagagaatcgtgcgtaccggtgtcaagccatgcaaaaccgcgccctaagagctgaactttcaaattcccatccttcaggaattcctggttgacagtcgtaatctccagttctccgcgggcggaaggtttaatctgcttggcaacttccaccactttgttcggatagaaataaaggccgacaactgcataattcgatttcgggcatgctggtttttcttcaatgctcaacacatttcctgcctcatcgaattcggccacgccatagcgctccggatcattgacgtagtaaccgaagacggtcgctttttgttcgttttccacattagctacggccctttttaacattgcggtgaaactctgtccgtaaaagatattgtcgcccaagaccagacaaacggaatcatttccaataaactcctccccaattaaaaaagcttgtgccaatccgtccggtgaaggttgttcggcatactcgaaacggacaccataatcggaaccatcccctaacagacgacgaaaaccgggaagatcctgtggtgtggaaatcaccaatatttcacgtattcctgccagcatcaacacagacaccggataatagatcatcggtttatcataaataggcaataactgttttgaaacccctttggttatcggatacaaacgcgtaccggaccctcctgctaaaacaatacctttcatattcttctatgatttacgatttatgattccggaatcatgcatcaatgataaatcatacatccaaaatcataaatccttaataaatataacggatggcaaatgtattaaaaataattcactttaccggctcggtgaaacttttctttccaaaggtttgttacaaagtagatttcaaaataattaaaaaacgaatttattatgaagacttttattgacacaatcaacttcggagtaaaaaactggtgggtttccctgctgttgggcctgctttatatcctcatcgcaatctgcctgatgttcacaccgctggcaagctatgtcgcactgagtgttttgtttagtgtatccatgtttgtcagcggcacgttggaaattctttttgccgtcaccaatagaaagaatatttccagttggggctggtatctggcaagcggtatcatcgacctgatcttaggtatctacctgatggccaatatcggcctgagcatggcagtgctgcctttcatcgtcgccttctggctgatgttccgcggtttcgcttcaaccggctacgctatggacctgaaacgctacgggacacgcaaccggggctggtatatggctttcggcatactggcaatcctttgcagtatcggcattatctggcaaccaggtcttggagcgttatcccttgtctatatgatcgcgtacactttgctgatcatcggcatcttccgggttatgctttccttcgaactgaagagcttgcacaaacggaacaaagaatacaacgaataaatcgtatgcttttctcagcagtttccaatccatgagaatacttcctcaccagggagagaatatattctcatccgtatgagaaaagattatcattacgacgagaaaagattgtcatccttatgagaaaaagcccctcataagacgaaaatcttttctcgttgtagctttatgattattcgctgaccatcttccgcttaatgaatacggccttacactcagcacagtccttccggcagttcactttggatacgacaacggcggccggtcgaccatacgcaaggtaacctgctgctcagaggaggccccgacaaaacctaagccacccgatacgttttgaggaacgatgaccggttccataaaggtttcgttataatcttccgaattcagacagttcatcgcacgcaaataacgataataaggttgtgatatgctcaataagcggactgtaacatccaagtaaaaatgatcttttccatttgattcgctaatatgcggaacagaggtgtagatcttaagggtatacgaaccattttcaaaacggccatccgtgaaaacattgctaagattacgaatagtccaatccaaaatgccgaatttgtcatcatcggcagtcgtaagatgcccatcggtcaacacaatatcctcctggttgataatttcgggataagaggaaaagggaccgtatttgatacctgtttccgaagaaatcctgtatgtattttcttcgataataagacggtaataatttttctcgttcggacgatcatgtatcgttattttgtatcgcatacaatccatcatgctggaaccacccctcaattgcgtacggagcgtatctacacggatagtttcctcgatcggaaaagggatctccacctcgcagccagcctggtattgcccgtcttcggctgtcgcttcaaagcggatacggtcaccgggacgaaaagatgttttcaacgtgcaattaggatcatcgaaagaaccatagaccttctccacctctgccgtctcggtcttttgaccgttgacatatactacaatggaaccattggaaacacaatccgcttgctgtttatcggtatcgatcatacgcagagacactccgttttctttctttccagcttcaagaaaagcattcatcagaagctgtgggacctgcggcttgttcatatatggaagctcattctcacaacccgggaacagcatggaaaccagtatgaataatataaataaattctttttcataattctactcctctttattaaaaccggtatgtataggtaatcgatggaacacaaggcagaagcgtttgctttatcagcctcgttttccgcttccaggtcgtctcatggctaccatccggcttaatatgctctactccgatatattcttcttctttatagataagattcggagtcatggcattataggcgttatagaccgaaatattccaagtctgcatgccgtggcgcaatttcttatggaaattgatgctcagattcaaccggtggctgacaggaaggcgataattgtttcgacgggaaatgtaatcaatcaagttaccagatgccgtccctgtacgctgttcggcaaccgtagccgttccgcccgtattaaaaatccaagtgatccctatatccgttttcttgctgaaagtatggtttacacagaggttgatgttgtggcggcgatcgtatttataaggaaaacgttcgccgttgttgaccgtcccatccttgaactggcgatcactcttggcgatcgtataccccaaccatcctgtcgttttaccgatcgtcttctgggctaaaatctccaagccgaaagagcggccacgtcccatctctaccttctcctgccatccaccggatgatccgaaaaaggtagcgccatcctggtattccaatacattatgcatatctttataatagctttctagagagaactcccacccttccacaccggtataataaccaccgacagcatactggtaggagcgcatcggacggatgtttttagtaaccggaacccataaatcggtcggcagcgaaatcggcgaggatgacagcaggtgtacatactgttccatttgtgtaaaagaagcctttgccgcaaaaccgtcatgaaagcgataacgcgcagaaagacgaggctgtgccgacagatagcctttcccttgtgtggaaaacaaggaaagatgaatgccgacattcaggctcagacggtcgctgatatcggcatagtcttcggcataaaacgaaaactcgtgcccgtgcaaatagctgttcgaggaatcgttgtagacggtatcctgtgccgtctgcccgtctacagcttctttcacacgcgaggtcgtcacctccggtcggaaggtatgatacagataagaaacaccgaacttgacatgatggtcagggacgggcatataatcgaagtccgtatgaaaactccaatcgtgtataccggaacggtaatcggaattatagacatacgattcacctctatcggttatcggatcaccgtttttatccgcctcgatgatatctttccggtaagtgtccgccatactcatctggtaatggttgtaggctacggtcgtattgctgaataatttactgttgaagacataattccaccgtccggcggcaatcgtgtttccccagttgaaatcgatccggctgttgtagaaatacatacgcgacccattcgaataggcgtcatattccttgtcctgcttgtagtcataatggtctttccctttgtagaaactgaggaacaggcggctgcggtcggaaaacttatggttcacctttgcattgatatcataaaaatagtaattgaatttcttgtcctccggcagaaacggccttgccaccaggtcgagataagtgcggcggccggtcaggcaaaaggaggttttatctttcaagatcggaccttcgaagtgtagcttactggtcaacaggccaatgctgaccgtaccgtgataattctgcatatcgccgtcgtttgtccggatatccacgatagaagacagacggccgccataacgggctggaaatgaacctttgaaaagcgtaacctttttcatggcttccggagtgaagatggaaaacacgcccaacatatggtcggcattatagatggggataccatccagaaggatcaagttctgatccggtccgccaccccgtacatacaacccgctgaaaccttccgttccagcctgtacgccaggcatcaactggattgttttgagaatatcagcctctcctaaaatggccggagtattcttgatctgcgtcatcgggatgtctaacgtacccatacccgttgcccgaatgcctgtctcttttttgtcggaaagaacgatgatttccgacaactggttattggtctgcaaacggatgttcattacagtatcccgacttaacagaaaacggcaatgcttggtttcatatcctaaatacgaaaagaaaagtccagtctctccttccggcaaggtcaagctgtaaaacccgaaagggttcgtcgaagtcccggcatgacagctggattccaaaatatttgcaccaatcagcgtttctgacgatatggaatcggtaatatatccgctgaccgtatatttacgggaaacaggacgctctcctaacaagatgtgtgtgccggagattttaaacgttatcgcttcctgaccaaatgcatattgcaggatttcctcgatggtcttctgacggacatcaagggtaacaggctgccggagctgtaccttttcaccatagataaacgagaagccggtggagtcctctaactggcggacaaaagtgtccagtgttgccttccggacctggaagtccagacgcgccgcccggtcttgtgcagcgagcggcgcaattctgaaaactatccataatagaagaataagccgggcgaaccggcggagacaatataggtaataattcatgacttagttaagtttagaatgaatcaagatcgtatcatttgtctttgaataactgaaattaccggctggctggagcagatcgagcatctgatccaaactctcaccttcagtaaaatgcgccctgatacgaaaatcctttatatcttcatccgtaattttgattttcacatgaaaagcattcgacaactctcgtgcaatctcctgcaacggcagataatcaaaatgaaaatggccgtcgcgccaaccggtagccgtattattttcttttgttttttcttcctgtagtgttttatctgctcgattataaatcgcgctttctcccggagaaagcgtaatccggctagaaacagccggcgcattgacagcgacagaaccttccaacaaagttgtcttcacctctgcatctccgggataggcttcaacattaaaatgtgttccgagcacttcgacctcgactgggtccgctttcacaacaaagggatgccgggcatctttctccacttcgaaataagcttctccctgtaattgtacttccctcctatcctccttgaaacgatccgggtaagtcaaagaggaatagcggttcagcgtcaccttcgtctggtccggcaaagtaattaccgatatggctgcaccggctgaaacagtttgcatcgctaccggcttccaataatcatagatgaaccaacttgcaaagcaaagcaggacggatgcagcaacgactcccgccagacggaacagtctcagcctctttgtccggggaggaacgagccgcctctccaacaatttccaactttcggaagcggaatagcgcccacgaggtgaacgtgtggaggcgacaagcttgtccagtgtcttttctatatgatcgtgtgtatgatcgtgtgaaggttccatgcttttctcttctacattttagagataaagacaggattaggtaaaaaactcactactcacttctattaaaataatgttaattatctcacttcctctatttgtcagccaacagagcttcccctaatacccgatcaagtatcaccttctttttttatataaccacacggaaacgcgccccctcctccagtatcattttgttatcttcatagggacaaaacaagatagatagaaacgttaaaaaatatcacccgccagtgtaatttccaaaacatgccctactaatcctattttgacggggtagtagtgacattttgataaatcataagaagcctatcccctcaaacaagaaatttgaaatagcagggagagggacaactgagactgccatacaaaagttctatgattatagaacaaaaaaacagccgaattatttgcagtttgtcagagaatgcatatatttgctgccgtaataacaacaaaagtcatgagaacaattatagtaaatacatattggtggtggcgctctttacaactcataaggtcgtaaggaaccagtcctcatgtatatactatcgtgatataataaaaggtctgtcgcacttgcggcaggccttttttcgtttagggcaattaccaagattcgaaaagacaaaaaataaataataacagatagaatgatgaaaacgtatcaagttgatgaaaatgggtattatggtgagtttggaggagcatatgtgcccgaaatacttcaccaatgtgtggaaaacttgcagaagaagtatctggaagtattggaaagcgacagtttcaagaatgaattcaaccagttacttcgggactatgtcggccgcccttctcctctctatcaggcaaaaaggctgagtgagatgtatggctgcaagatatatctgaagcgtgaagacctgaaccataccggcgctcataagatcaacaacacgatcggacagatcttgttggcccgccggatgggaaaaacccgtatcatagccgagacgggagccggacagcacggcgtggcaaccgctaccgtctgtgcgttgatgaatatggaatgtatcgtttatatgggcaagacggatgtggaacgccaacatgcaaacgtgcagaaaatggagatgttgggcgcgacggtcatccccgtaacttctggcaacatgacactgaaagatgcgaccaatgaagcgatccgcgactggtgctgccatccttccgacacatattacatcatcgggtcgacagtcggcccccatccttatccggatatggtggcacgtttgcaatccgttatcagcgaagagattaaaaagcagttgtcggagcaggaaggacgtgactatccggattatctgatcgcctgtgtaggtggcggaagcaacgctgccggaacgatctatcattttattgatgatgaacgggtaaaaatcgttcttgccgaagcgggcggtttggggattacgaccggacaaagcgcagcaaccatccaattaggcaagaaaggtatcatacatggagcgcgcacattagtgatacaaaacgaggacgggcaaatcgaagagccttattccatctctgccggactggactatccgggtatcggaccgatccacgccaacctgtcagaaactcaccgggctacgattcttgccatcaatgatgacgaagcgctagatgcggctttttgcctgacgcgcatcgagggaattattccggcacttgaaagtgcgcatgcattaggggcgttgcctaagataaaattcaaaccggaagatgtcgttgtcctgacggtatcgggccggggagataaggatatggagacttatattaagtataaattgaaaaacgagaagtgaaaagtgagagtcaggaagttcttcctataatcagttttataatcatcaattgtcgatcataatggactatacatttaaaacaataagcaggaaggttctcggtgaccttcatacacctgtcagtatctacttgaaggtacgggacgtttatccgaaatcggcgttattggaaagttccgattttcatgggaatgaaaacagtctttcttacatcgcgctttgtccgctggcaagtatcggaatcaataacggggaatgcaccgctgtttttcctgatggaaaaagcgaggttacggcattgaccggaacattcaatgtggcggaggccatgaatgcgtttttgaagcgtttctcgatcgaaggacctgacaggaaagtctgcggactgttcggatatacggctttcgatgccgtgcgttactttgagaacatcccggtgatggaagcgcaccatgaagaaaacgatgctcccgacatgctctacatattatataagtatgtacttgtcttcaaccacttcaaaaatgaactgacgctcgtcgagctgatgcaatccggcgaaaactccggtttgcaagagatagagaccttgatagaaaaccggaactatgcttcttataacttccaggctaccggccctgagacatcgcctgtcagcggggaagaatataaagcaatggtgcgcgaaggcatccgtcattgcctccgtggagacgttttccagatcgtgctgagccgccggttcgaacaaccgttcaaaggagacgacttcaaggtttacagggctctccggagcatcaatccctctccctatctgttttacttcgacttcggaggattccgtatcttcggctcttcaccggaaacgcactgcaaggtagccgacggacatgcaagcatcgacccgattgcaggcacggctttccgcacgggagacgttgcattggacagacagcgtaccgaagctttgcttgccgatccgaaagagaatgccgagcatgtcatgctggttgaccttgcccgtaacgacctttcgcgcaatgcgcatgacgtacaggtcgatttcaacaaggaagtgcagtactacagtcatgtcattcatctggtatcgcgtgtcagcggtgagatcgatgcagacagcaatccgatcaagacctatatagatacattcccagccggaacattgagcggagcgccgaaggtacgtgccatgcagttgattacggatatagaaaagcataatcggggcgcttatggcggttgcatcgggttcatcggctttgacggcgacttgaaccaggcgatcacgatccgtacattcgtcagccgcggaaacgtcctgtactatcaggcaggagccggcattgtcgccaaaagcaatgatgaacgggaattgcaggaagtcaataacaaattaggcgctttgaagaaagcgatcgatctggcaacaacacttataaattgaaagttgaaaattaaaagttgaaagtttttatgaaagtattactgttcgataattatgattccttcacctacaacttgttgcatatactgaaggaattgggtgcggaagttgaagtacatcgcaatgacaagatttcattagacgaagtagaacgttttgacaagatccttttgtcacccggtccgggcattccggaggaggcaggcatcttgctgccgttaatccgccgctatgcgccgaccaagagcatcttaggcgtctgcctcggagagcaagccatcgggcaagcattcggtgcaacgcttatcaacctggcggatgtacatcacggagtctgttcggatatacgggtgacggtgccggatgtgttgtttacgggcttggaacccggtttccgtgccggccgctaccattcgtgggtcgtatcgaaagagaatttccccgactgcctggagatcacggcagaggatatggaagaaggacagatcatggcgcttcgccatcgcgaatatgatgttcgcggcatccagtttcacccggaatccgtactgacccccaagggaaaggcaatcatacggaactggctgggaataaattaaaaattaagaattaaaaattaaaaatcaaggatgaaagatatattatataggttattcgaacatcagtatttgggacgtgacgaagcgcggacgattcttcagaatattgcagaaggcaagtataatgattcacagattgccagcttgataacggtatatctgatgcgtaatatctccgtagaggaattggcgggttttcgggaggcattgctcgaaatgcgcgtcccggtagatttgtcggagtttaagccgatcgatattgtggggacgggaggcgacggaaagaatacgttcaatatcagcacggcttcctgctttgtcgtagccggtgccggatataacgtcgtgaaacatggaaactatggggcgacctcggtcagtggcgcgagcaacgtaatggagcagcacggtgtgaagtttactgccgatatcgaccggttgcgccgttcgatggaatcctgccatatcgcctatctgcatgcgccgttgttcaatccggcactgaaggctgtggctccgatacggaagagtttaggagtgcgcagcttcttcaacatgctcggcccgctggtcaatccggtaatgccgacctaccagttgttaggtgtgtacaacctgccattgctcaggctttacagctatacctatcaggagagcggaacgcgttttgccgttgtacatagcctcgacgggtatgacgaaatctctctgacagcagaatttaaggtagcaatgccggaaaaagagaagctctacacaccggaaatgttaggtttctcccgcacaacggaagcggaactggatggcggtgagacagtcgccgaagcagcccgcatctttgacgatgtcctgaataaccgggcgactccggcacaaaagaattgcgtaatcgccaactccgctttcgccatccaagtcatctgcccggaaaagagaatctcagaatgcctggaggaagctcaagaagcattggaaagtggtaaagcattgcagacattcaatacgtttatcagtttgaatgacaaattacaatgaaacaacgaatatgaaagatatattacaagatattatagcgaataagcgtatcgaagtggagcgacaaaaacaagctgtccggttgcagaccttactggggatgggcgatgaacgactcgaacatcctgcccgttccatgcgggcggctctcgcagcatcttcatcgggcatcattgctgagtttaagagaaaaagcccttcgaaaggctggttacatcccgatgcagctatagctgatgtcttgcccgcctatgagaagggaggcgcttccgcctgttctgtcctgaccgattcgaactttttcggggggtccttaggtgacctttgcaaagcacgcagcctggtgggcctgcccttattgagaaaagacttcatcattgacgaatatcaactctatcaagcacgcgtaatgggtgccgatgccgtcctgttgattgccgcctgccttaccccagaacaatgtcttatgtttgcggagttagctcataccctcaacatggaagtactgttggaaatccattccaaagaagaacttgaccacctcaatccatttgtcgatatgttgggagtgaataaccgcaacctcggaacatttcatactgatgtggaaaactccttccgtctggcaaaagcgatgcaaacggtcgctcgtgaaagaaatctttctcctttgttagtatcagaaagcggtatttcgaccacaaccaccgtatcgaacctcagagaagctggttttcatggattcctgatcggagagacattcatgaaaaccgatgtaccaggcgacactctcgcacaattcataggaagattatcatgatcatcaaagtatgcggaatgcgtgatcccgaaaatatacgggaagttgcagccttaggggttgactggataggactgatatttttcgcgagaagcccacgaagaataactaacaatggacaattaactattgacaatggcggcaagcggtattccgattgtcaattgtcaattatcaattatccattaaaaaaggtcggtgtttttgtcaacacttccttcgaagagttggtggaaacagcggcatttttccgactcgattacctgcaactgcacggaaatgaaacaccggaagattgccatgccttgcaaaagcgtggttactcgctgatcaaagcatttcagattgcaacagcttgcgatcttgaacaaactaccaattatgaagggcgtgtcgattacttcctcttcgataccaaatgcaatagttatggaggttccggcaaacaattcgattggtccgtgctcgaagcctaccggggaaagactcctttcctgttaagcggaggcatccgtccggaaagtgctggggcaatacgttctttccggcatccccgcctcgccgggatcgacctgaacagcggattcgagattgaaccggggctgaaagacataggaaagctaaaggagtttttaaaagcaattcaaaatcataattcataaatctgaaatcacaaatcaaaagatgaaccgtatcacaaacttattcaacacaaaaaagaacggaatcctttccgtcttctttaccgccggatatccgaacctggatgacacgaagaagatattaaaagagttagaaaacaaaggaatagacatggtagagatcggtattcccttctccgacccgatggcagacggcctcgtgatccaggaagcctctactgccgcgttacgaaacgggatgtcattgcatgttctgttcgaacagttagaagatatccgtcaggatgtgcatatcccgattatcctgatgggctatctgaatccgatcatgcaatatggcttcgaagcattctgccggaaatgtgcactgacaggtgtggacggtatgatcattccggacctgccttttgccgattatatgaaagagtataaagccatcgccgaacggaataacctcaaaatgatcatgctcatcacacctgaaacctccgaagaacgcatccgcctgatcgatgaacatacaagcggtttcatctatatggtgtcgagcgcctccactaccggagcgcagcaaagtttcaacgagcagaagcaggcttatttctaccgcatcaacgggatgggactccggaatccgcgcctggtcggtttcggcatatcgaacaaagcaaccttcgatgcagcagctattaactcatcaggggctattataggaagcaaattcatacaattattgaaaagcgaaccgatctctgtcgccgtcgataagttacgggcagccattcaggagtgaaatgaacagaaaaacaaacattttaaaacagtcgtcctccagcaaataggaaaaatacttctttttaccttttcgttgagggacggcaataaatcagacctacttcaaaggactgatagatgtcgatatcctgccgcccatggattgtcgccgaataagccgattactttatcggaaggttgtacctgcaataccgtgtactctgcttccatttctattgatggcgcttgcaagacaccactaacgctgcgcaactgataacacctaaaagttgcattcatcttttcaaactggaagatgcctgtatctttttttgctatagcgggaaagcccggatcgaaatcgatttgttggaatatgacatcgtatctaatacgcagatcatattcctacctaacagtattatcaattattcatatgcaagtccagacctctctatctcttatataacattttccaatgcgtttttccaagaagcaacagtccggttcaccccttcttttttcattttctgaaaaagaatcctgccgtcacgttaccagccaaacgtacacgcaccattaacggactcatcattgcactggaagacctctataaagataaagaaaactgtttccgactacaaatcctccgcaactacacgcaaagtttccttttggacatttacgataagacacattgtatcttcaagcagaaccacccgggaggaatcaaccggcaggaagatttgttcaaacgatttatccagttgatacacaaacactgcctcagtcagcgcgaagtttcattttacgcaaaaaaatgttcatcacccccccgctatctatccgccatcgcgcaagccgtctccggagaaacagcaaaaaacatcattgataaacatgtcatactcgaaataaaagtattgctggaatcgacagacttaacatacaggaaatagccaaccacctccagtttccggatcagtcgcttttcgaccggtatttcaagagacataccgacacttctccgcaatactacaggcgtaaactcggttagccggagcctgttccccaagcacggaacaaaagtttccggcgtatgaaacttttgtttcctaacctgcgaaactgtttttctctcctaccttgccaaattattcaaagattcatcgtatatttgtcgataggtttaaaaccttgtaaactgtatattaacaagattaattctattagtaaatgggaagaatattagttattggtgcagggggcgttagtaccgttgctgttaagaagattgcgatgaatgcagatatctttaccgatatcatggttgccagccgcacaaaaagcaaatgcgaccggattgccgccgatattaagaatgtaaaggtacaaacagcacaggttgatgcagacaacgtggaagaactcgttaccttgttcaattccttcaaaccagacttagtagtaaacctagctttgccctatcaggatctccacatcatggatgcctgcctagcatacggtgtcagctatctcgacacggccaattacgaaccgctggacgaagctaaataccaatacagctggcagtgggcatacaagaaacgtttcgaagatgccggtctgactgctatcctgggttgtggattcgatccgggcgtaacaggcgtatatacggcttatgcggccaaacatcacttcgatgaaatacaatatctggatattgtagactgtaatgcaggagaccatcacaaagcatttgcgactaatttcaacccggaaatcaatatccgcgagattacccaacgaggaaaatatttcgaggacggagaatggaaagaaacagatccgttgtccatacacaaaccgttgaactatccgaatgtcggtccgagagagtcctacctgatgtaccacgaagagttggaaagcctgaccaaaaacttcccgacaattaaacgtgcccgcttctggatgactttcggacaggaatatctgactcatttacgcgtgatccagaacatcggtatgtcccgcattgatccgattatgtataatggacaggaaatcgttccgatccaattcttgaaagccgtgttaccaaatccgggggatctgggtgaaaactatacaggcgaaacctccattggttgccgcatccgtggtatcaaggatgacaaagaaatgacctactatatttacaataattgtagccaccatgccgcttacctagaaacaggggcacaaggtgtaagctatacgactggcgtcccggcgatgatcggggccaaactgttcatacagggagtttggaaaaaaccgggggtttggaacgtagaagagttcgatcccgatccgttcatgaaggaactgaacgaacaaggtctgccttggcacgaactgttcaatatagatctagaactgtaaacaatggacaattgatagttgacaattatattaatatcctttttaattgtcaattgtcaattatcaattaactaaatggctcgtaatatttacaacatactacgtcttggtacacaaatcaaaagcagaaggctcaaactattgggtatttggctatttcatgtgttaggcaaacgatatatcggcgtttttctcgatccggtactagcctgtaacttccgctgtaagatgtgttatttcagcgacgaggaaaaaaggaaaagtctgcgaggtacactgaaatatgaagaaatagaagccattgccggaagcctgttccaccgtgccttgaaacttcagatcggttgcggagcggaaccgactttgcataaggatctggtaaaaatcattgcactgggtaaacgatacaacgtcccttacgtttcactcacgacaaacgggaatctgctgacaaaagagcagttagccgttgctgtagaaaacgggttggacgagttgacactatcggcacatggttttacccgcgaaacatacgagtatctgatgacaaacggtaaattcgacttgttccgcaggctgctcgccgacgtcgcagaaataaagaaacaacatccgcagttcaagttgcgcatcaattatacgatcaacaacgacaatctcgaagaactaaaccggatatgggaagtcgtcggcgatgaactggatatcctgcaactccgtccgatacagaagataggagaaagcgaatatagggatttcgacctgaccaatatccatgcgagatatgatgccgtactggttccgctaatcgaagaatgccgccgcaggcatatcacctgcctggctcccaacaagcagaatatcatcgtgctggagggaaacgaggcggaagataacagcatcgaaaagattacatactgctatgtttctccccaggaatgctggcaagatgatttcgattaccggacggaaacattcgagtcatatgccgccgctcattatatgggaagaaaactgttttggaaagtattcaaacagaaagcccgccggaaagcggatgtaacacgcaagatgaactataatatcaagtaaaataaatatatggcaatacaaataggagataaagcacccgaaattctgggacttgaccagaacgggaaagagataaagctgagcgatttcaaaggtaagaagttagctctctatttctatccgaaagacaacactagcggttgtacagcagaagcgtgcagtctacgggacggttataaggaattgcaagctgctggctacgaagtagtgggcgtcagcaaagacaatgctaggtcccatcagggatttatcacaaaacaggaacttcccttcagcctcatcgctgatacggatacgaccctgcaacagcagttcggggtttgggcagaaaagaaattgtacggacgttcatacatggggactctccgtaccacctttattatagatgaagacggtatcgttaccaatatcatcggcccgaaagaggtgaagactaaagaccatgcaaatcaaatccttaatctataaaaggaaatggcaaaagaagatttattcgaagaaggcaaacagccggcagccgagaaaccggctgtaaacgcagacaaattgaaagcgcttcgcgcagcaatggacaagatcgaaaaaaactacggaaaaggttcgatcatgaaattgggtgacgaaagcgtcgaaaatatcgaagtgatcccaacaggttctatcgccttgaacgcagcattaggtgtaggcggttatcctaaaggccgtgtgatcgaaatctatggaccggaatcatccggtaagacaactcttgcgatccatgcgattgccgaggcacagaaaaatggtggtattgcggcatttatcgatgcggaacatgctttcgaccgtttttatgcagaaaagttaggagtagatgtcgaaaacctgtggatttcccaaccggataatggcgaacaggcactggaaattgctgaacagctaatccgttcatctgctgtggatattatcgtaatcgactcagttgccgctctgactccaaaagcggaaatcgaaggcgatatgggtgacagcaagatgggactacaggcacgattaatgtcccaagcacttcgtaagttgacggctgcgatcaataagactaacacgacatgtatattcatcaaccagctgcgtgacaagattggcgtgatgttcggcaatcccgaaacgacaaccggcggtaatgcgttgaagttttatgcctctgttcgtctggatatccgcagcatcggtaaattgaaagacggtgatgatatcaaaggtaaccaagtgcgcgtaaaagtagtcaagaacaaggtcgctcctcctttccggaaagcagagttcgacatcatgttcggtgaaggtatctccaaagccggtgaaataatcgacctgggtgcagaactgaacatcattaagaaaagcggttcgtggtacagttacaacgacactaaattaggacagggacgtgatgccgccaaacaatgcgttgtcgacaatcctgaactggcagacgaattgtccgacctgatcttcgaagcgttaaaaggataaaatcaatggcacacagatgatacggatcaagtctgtagtcatctgtgtccatgattatacagaaaatcattcatgaacacaaaagacaaataccatttgctttgcaacactgaaactagtattcccatcttttcccgtgactggtggctcgatacggtttgtggcaaagataaatggaaagtcttattggttgaagaaaaagaaaggattacggcagcgatgccactttattgtcctcgacaaggtattatctcaatgccatcctacacacaaacaatgggtccttggttcgcaccggaatccaaagataccaaatacaccaaaactttaggccaccggcaagttttatgcaaacaactgctaaacacgcttaaaagctatccgtattttatgcaaaattttcattacggaatcaccgactggctaccattctattgggaaggttaccgacaaacaacacgctacacctatatgttgaaggatatccgaaacacaaaagcaatattgggaaatatgagtttcaatatccgacggaacatcacaaaagccagagacaaatatcatatcacagtaaaaaaaggaatttctatagaagagttcttgttgatacaggcacaaaccttcaaacgtcaacagatcaccaacaaagaagatatggaagttttaatcaaactgatcaatatttgccgaaaacgggaccagggagatttatggggcggttatgacgaacaaggacgtttgcatgctgtcgcttttatcgtctggcaagaaagttccgcctggtatctggcaggtggaggaaatccgactcttcgggagtccggagcacacagtttaattttgtgggaagcaatccgttatgtttcacaatataccgacacatttgatttcgaaggttccatgataccgggagtcgaacgttttttccgtgaattcggtgcaattcaaacccccttcttcacaataaccaaaggaaaattaagtttattaaatagagcctgtttaaaaataggaaggataataaacagataaattatttatgatattaaacagttataataatatactggttttagccccccatacggacgacggggaattaggactgggaggaaccataagcaaacttatcgaactgggaaagaaagtaacctatgtcgctttttcaaccgctcagcagtccgtacccgaaggttttccgaaagatattttgaagacagaagtcaagaaagcgactgcccaattgggaatatcacctgaaaacctcatcatctacaattatgaggtccgtaaactcggatacgtccggcaggaaatattggaagaactgatccgcctaaaaaaatcgaacagctttgacttggtctttatcccaagcctacacgacattcaccaggatcatacaacgatcgcccaagaaggcctacgcgccttcaaaaacacgacactgctgggctacgagttgatttggaacaatctgacattcaacacacaatgtttcgttgaactgaatagagagcacattcaagccaaagtcgaagcattaaaagcatacgaatcacaaggaacacgcgactatctatccgaagagtttatcttttcactggcaaaaacacgcggtgtacaagctggctgtccttatgctgaagcattcgaagtagtccgtttgttcctgtaaagttgaaagacagtatgaaaaccgttatttcctatattaccaaattcctgataggaggagaaaaggccgatgtattagccagtcttgtcggttacacatcggatcccaacaaattctcccgttatcgcgtagtcatcatcccgtccccctttttccgggatgaagtttacgggacagccgagtccatacccaaactaccactggaagagatagaaggcatacctctgctcttcggttctcccaaaatagaatggcagggggatacttgggtggtacatgccgatatcatcgccagtgcctattttctgctgacgcgatatgaagaaatacggaaacgcaacatacgggacatccacggtcgcttcctcggaacagaatccctacccttcaaagcaggattcattcatcgcccgatagtcgacgaatacggtaaattgttgcgacgctggttacgccaagcgcgtgtacagtcagccgtcgaactgcccccacacatacaaaaagtatggctgacacacgatgtagatgctcctttcttttgccggactttccgcaacttgatacgagaaacagttaaaggcacaggactgaaacatgcctggaagatgtttcaaggtccgttacagaaagatccgttctacacatttccctggcttgtaaaacaacgaaacaaattaaaggccgttatcggaaaaaaccgttgtgaatctctgttttttatcaagtcaggtggctcatccgtttatgacaagcctcattataaactgcattcaaaggacttacaagagcttttgctcttttgtaaaaccgaaaaagtacagattggactgcataccagttacgatgccggtaaaacaccggcactcatctcaacggaaaaagaattgttggagagacagaccggaaaatcggtcacttacaatcggcatcattatctggcctcacgcgaaccggaagatatggtatggttggaaaaagcaggtattacagatgatttcacgatgggctatccggatgttgccggttttcgcctcggcacatctcgtccggtacattggattaatcctgagaataaacgtatctcgccacttattctccacccattggcaatcatggaatgcagcctgaacgaacctgtttatatgaatcttggctatgagggagcacttgcctactcaacacaactcatcaaacaggtggcatctgccaacggcgaactggtgttgctctggcataacgactccatcaccacccggatcaagccgaatgtctctgtcgactggcaacgaaaactattcgccgccatcattgaagaattgataaaatcatgaagatactgatattatgtgatatgtttccccctgcattcggaccgagaatgggctatttatgcaaatatatgaggcgggccggatgggaacctgtcgttgtcactgagcaaatcgatgacagcacgttctctttcctgaaaggagaaacgcctgtcacatatgtaaatttctttcattccaaagggaaaatcctccaaaagttagagtggatatgcgtattcatactcgattattttttccattataaagacaagaagatggcaaaagccgcctcccgtttactggaagaaggggaatatgccggtatcctgtgcagttcataccgaactttccccttgccggccgcccaatatatagcagagaaatatcatctgccgttagtaatcgaccttcgagacatagtcgaacaatatgcttccaacgaatatatcgctcataacttccgtaccttttcctggttggatagaaagatcacggaaatattccgtcataagttattgcgggacagaaataatgcattgagaaaggcggagcaggtcacgaccatttccccctggcatgtggaaaaacttcaagcatacaatcctaacacagagttggtttacaacggttacgatccagagctcttctatcctgaacaacatcggacctctcaattcgtcatcacctataccggacgtttgattagcttggcgacacgtgaccctcgattgcttttcgaggccgttagccggttagatcgtgaaaagctcattgatccggaccagttccgcatccaatggtatgtcgacgccggatcaaaagcgatcatcatgcaggcagcaaccgcttacccagtcgcccggtatatggactttttcgactatgttcccgcttccgagattcccggcgtgttaaaccacagttccattctgctgcaactcgccaatacctttgcatccaacggaccaaaaggatttatgacgaccaagcttttcgaatcgatggctgtcgaaaaacctttactctgcgtaaagagtgacgaaagttacctcgaagcgaccatccgaattacccgttccgggctggcagcccggacgaccgaagaagcctatcgttttatcttgcaccattatcagttctggcaggataacggatacacacacataaatacggataaggaggcggtggaacgtttttcccgtaaaaaacaagctgaacaatttatgcgtatctttactcgactaaacagcaaatgacagacatggaaaggtatctgaacattatagctttcaatattccctggcctgccaactacgggggaatcattgatgtatattataagataaaagctctgcaccagtgcggtgtgaagatcatcttacactgtttcgaatacgaacgtgcccattcgcccgaactggaagccatctgcgaaaaggtattttattacaagcgacatacagggctacgtaccaatataaccctgctgccttataacgtatacagccgcaagcatcctgaactgatcgccaatctgttgaagaacgattacccgatcctgttcgaaggactccattgctgttattacataaacgatccgcgactacacaaccggaaaaagatttaccgggaagcaaatatcgaacacgactattattatcacctggcacaggcggagagccatccgatcaggaaaagcttcttccggatagaggcttggcgattcaaacattatcagaaaatactgaaacatgccgatctgatgattgccgtttcaacaaccgatgctgactacctccggcaccagttccccgacaaaccggtcgaattcatgccttgctttcacaccaacaaccaaattacggtcaagccgggttcttccgattttatcctctatcatggtaaactatccgtaatagagaatacacaagcagccctctttcttatccggaacgtgttcagtaaactggactgccgttgcatcattgccggtatgaatccgccggcttctttgttgaaagcggcagctccctatccgaatatccatatcgaagccaatccgtcagaagaacagatgaacgacttgatacacaatgcacaaatacatgccttgattacttttcaggcaaccggattgaaactaaaactactgaacagcctgtttgccggacgccatacagtggtcaaccgactgatgatagcaggtagcggactggaatcgctctgccatatcgccgacactccagacgaaatggtctgcatctgtcggaaattgatgcataccgatatggctccggagtcgatcgagcagcgccgcgactttctttatccgacttattccaatcaatatcaaggcgaacacctcttacatttgatctatgaagtatgatatccgacaagcagcacaagcattgattagccaactaaaggctatcgattacgaacgattgcctatcagtaaatataacaaacgttatattgcccggctgaaaccagttttatcctattacatgaaaatctatgcggactgtctccttaaaggactggaatctatcggtagctcaccggaggagataacacttatcgactatggtggcggaagcggcttcctgagtatacttgctaaacaagccggaatcggccgagtcatctacatcgacctcaatccggattccgtcgatacgatccgcatcttgaaagagctggtcaatacaggacctgacattattcttcatggagactcagacaccttagcagattggtgctcggcaaataaagtcaagccacaattgctgatcgcgaccgacctgatcgaacatgtttacgacctgtcggcttttttcgccaatttggttgccatcgacaacaagatgcaaatgttgtttacaacggcctctacaccttttaacccgtatgtgaaaagaaggctgcatcggcttatgaccatttgggaaaaggaatattatgctttacgtctgcattatatccaactgcactttccggccctttcccctgccgaagcgaaagaagctgcacgaaagacgcgcggacttaccttcccacatatccacaaggctgtcaagaccggttcctatcctctattgaaagatgctttcaacacctgcgatccacgaaacgggaattggacagaacgcatcttacccatcgaaacatatcgctcgctggcaaaacctttcggttatcaagtccggataggaaaaggtttctacaacacagatcgctccaacccgatctccacattcatttgcttaggtatcaacggtctgatcaggatcagcggaaaagctggtttcctatttgccccgtttataaccctgcacctacagagcgataacaaaggacgataagttacaataaccaaagctatgggttacgacgcttaaagctatgcattagccatcgtaaagctatgggttatgtctcctaatccgcaacagaccggaagagtagttgcacatactccttttcccaatcggcaggtttcaggattgttccattccataaaagcaggtctatatcgatcggaatcttccctttctgcttactgtccgacatgcgtcccaatcgtttttccatcgccttcacagcccgcctcacctcttccagcgaagcattcgtaccggcaacagccacttggttcaagaataagccggaatcggataaacctatcggctccgtataaatcgcttcagagaaccggatcgatccgaaataagcacgcaacagactggccgccgactttagattcgcctcgcaatccgtattggaccccaaacataatataacattgttccacatagtcatattttaaagcctttacggagacaaaactaacaaaaaaatacctacaatacggtattgaccatattaccatttcatgctacctttgcgcaagattttaaaaagatgagactatcagaacttcgtacaggcgaaaaaggggttatagtaaaggtaatgggacgcggagcattccgcaagcgcattatcgaaatggggtttatcagaggaaaagaggttgatgtcatccagaacgcaccgcttaaagatcctatacactaccgtgtaatgggttacgacgtttcattaagacgaaacgatgcgcaaatgatagaagtcgtcagtgtggctgaattcatagaagccagtaccggaaaacaggaaaaccgcccggtggattcttatatccaaacatctggcaagagtttacaggctatggccatgcacaaaggtaaaaccatcaatgtcgcattagtcggaaatcccaattgcggtaaaacatctttattcaatttcgcatccggtgcacacgagcatgtcggtaactacagcggcgtgacagtcgacgccaaagccgggacattccatcagaatggctataccttcaaaatcgtagacttgccggggacctattccctatcggcttacacccctgaagaactctatgttcgcaagcatctgaatgaagaacagccagacatcgtaatcaatgtagtcgatgcatccaacttggaacgcaatctgtatctgacctgccaactgatcgatatggacgtacgtatggttatcgccctcaacatgtacgacgaactggaacgacacggaaataagttcgaccataactctctctcaaggatgatcggtacgccgattgttccgaccatcagtaagaccggcttcggtatcgaagaacttttcaaccgcgtcataaaggtctacgaagaagaagatcccgtactccgccatatccatatcaattatggtgatgtattggaaaaggccatttatccagtaaggcatgctttgaaactgaacggaaatgtatccaaaagcctttccaagcgctaccttgccatcaagttgctagaaggcgatccggaagtggaatcattcgtcaagtcaatgcctggttccgaaacagtcatccacgaacgcgaccgcaatgtcgctcaaatcgaaacccttctgaaagaagattgtgagacagccttcaccaatgcccgctacggttttatttccggtgcactgcgtgagacctacgagcaaaacaaaataaaagaagcgacaagcacccagatcatcgatctgttcgtaacccataaagtgttggggttcccgatcttcatccttttcatgtgggtcatgttcgaagccactttccgcttgggagaatacccgatggaatggatcgaatcgtttgttggctggatcggagagttcgtacgtggaaacatgagcgaaggcccgttgaaggatttactggtcgatggcattataggaggcgtgggaggcgttatcgtattcctgcccaacatattgatactgtatgccttcatttcttttatggaagattccggctacatggcgcgcgccgctttcatcatggacaagatcatgcataagatggggctacacggcaaatcgtttatcccgcttgtgatgggcttcgggtgcaacgtgccggctatcatggcatctcgtacgatcgaaagccgtaacagccggatgatcaccatgctggtaaacccgttaatgagctgtagtgcccgccttccggtgtatgtcctgctgacaggtgctttcttcccccagacggccggaacggtcatgctgatcctctatgcttcgggtattctgcttgccgtcttaatggcacgtctgttcaagcgcttcctttttaaggacgaagatgtacctttcgtgatggaacttcctccttaccgcatgccgacaggtaaatcaattatgattcatatgtgggaaaaagccaagcaatatctgcacaagatggggggggtcatcttgatcgcttctatcatcatctggttcttgggatattttcctcgtcattcggaaaacggagatgtttttgagaagcagatcgccgaagtggaacagtccgacacgaacccggaagacaaagcggaaaccatcgctgaactagaacgcctgaaatcgatggaccatcagcagaaatcctacatcggccgtatcggccaagccatacaaccgatactccatccactgggtttcgactggaagatgagtgtcagcctattgaccggtatggccgccaaagaagtcgtcgtcagcacactgagtgtcttatatacaggagagtcggatgatagccaggtcttgaccgaacgattaaaacaggataaaaatgccgagggagaattggtctttacacctttggtcgcactgagtttcatgctctttgtcctgatctatttcccttgtatcgctacaatatcggctattgtccacgaatccggctcctggaaatggggtatatttgtaattgtttatacttgcgtacttgcgtggttcgtctcatgcgtagtctatcagacagggcacttctttatgaacctgtttaattaatacaccttctttatgtggcaggaaatagcagttttcatcatcggccttatcgttattttctatatcggaaagaaaatatataagttctttacacatcccaccggaacagacaatccttgtcaaggatgtccgggatgtgcattaaagaacaaaatccgaaacaactgtatctgacttctctacccaaaaacaagagattcgaggaagtatattattttgctattttatacagataaagtagtactcaaagatttacactatctttgcaaccgactaaacaatagaaaaatgcataagaaaatttatttatcagttattttaggaattctgttctttgtctcgtgtaaagacaaaaaacaatattacgaagaaagtggtaccgtgtttcataccctatatacgatcaaatatgaagcgccccatattttaacggataaaatcgatgccgagttgcaaaagttcaacctgtccttgaatcccttcaacccaaattcgatcatcgcaaaagtgaataataacgaagcggtggaagtagacgaatggttcacggaggtatttaacaagtcgatggaagtttcccgcaattcagatggtgttttcgatatcacctgtgcccctctggttaatctttgggggttcggtttcaataaaaaggacagtgtgacacctgctatgatcgacagcctcaaaacttttgtaggctaccgaaaagtacatctggaaggcaaaaaggtcgtgaaagacgatccccgtctgctattgaactgctccgccatagccaaaggatattcctgtgacgtgatcgcccgcctgcttgaaaaagaaggagtggaaaactatatgattttgattggaggcgaagtggtagtaaagggtgtcaatcagaatggcgtatgctggcgtaccggtatcaatctcccggaagacgatccggacggcatcaaaaataattatgacgaaatcgtccaactatgtaaaaaaggcgcgattgccacttcaggcaattatcgcaacttttatatcaaagacggtaaaaaatatgcccatacaatcgatccacgtaccggttatccagccgaacaaagcgtgttgagcgcaacaatcgttgctaatgactgtatgactgccgatgcttacgccactgcatttatggcaatgggcttggaaaaagcccggcaaatggcagattccttacctgagatcgaatactatgtgatatacgctgacgaaaatgggaagcatcagattgaatactcaaaagggatgcttcagtatctgcctaaacggaaacaatgataagttcggataattcctgattgattaaatatgacaagaaacgtcctgaaccagtttgaatgtaaaataggaaaagcgggcgaaattttatgtaatacggaagacaccggcaatgtcttattgtttgtctcttccggaaaactggtcatctataatcaaaaccagacgccggttgccgatgtggacgaaggacattttgtattactgcctgccgaaaaatcatttattgcgatagccatcacatcgacacgactcatactcatgcatgccgatccgctttccgaaatgataacagacgatccggaatggaatccggatcgtcctgtcatactccctatctgtccatctttagctaaaaccctatacataatcgaatattatcaaaatgaaaagcgaagcgaactgaactaacgaagcatagcttttatcaactcgttattttcctgatgcaaactgaaacgtaccttgtgatcgtcgccatactgccaatccattatcggaacattgtttactagcacttccgacgggcgctgcggagcgtcgatctccaattcgtatgtccgtgctttgcacatgccgttatacgatccttccactgggaaaacagtaaactctactatccgctcgctctgcttacattcaaaacgggttgtagcaatcgctccattttcataatcatatgttttaccatcatcttcatacatcgtataggaagagacatctttgggaaatactttcaccatcaaagtatccaacggttcctccccaatgaattgcatatctttttggaacggtatgatcgccccttcacgtacgaacagcaaccctgcacggttatcaggtattgcatgcttgatttccctaccgccagccaatttttcacctgtccaaaagtcaaaccagttccctttcggcaagtagatcgaatcactgaagataccgaccagaaaactttggccaaacatatactgatagaccatatcatccgtcttacggtcatcaggaaacatcaaaggcatggagcgtacaatcggcataccggtctgtgccccttccaatgctgccgaataaatataaggcatcaacgcataacgcaacttcacataatcccggtacattttcttttctttctctgggaaatagaatggttgatgcaacgaataccaactattgatctgcacccatggcaagaagaggccgaaatgaagactctgcagttcctcgtccttattgacattcatcacgtcgcaagaagtattgagaaaaccgctcatacccaagttcaactggtcgaacagagccgtacgccctcccccgttatcaccgctggtggaagcgctccaatgctgcgttcccgaccacccggcagtataatgatgccaagaacggagtccagtgtgttcacgcatcatcttatacatctgcttcggcaaaagaatctggttcaagttatgcatctctttatcggtgtgtccgttataatacttgaaattcggatgttcgtctatcgtacgtgccgggtccatcttgaaaccgtctacaccattatccacaaagttcttcaaatgatccatccagtgctcctgcccggaaagaggcttccccatcgccttcgccaacgcatcctcctccggaacgctcagatcatactcgatacagagccaaagccccatgtgataccccatcccatgcagacggccgataagcagccgatggttttctttcttcggatagcgagtagaatcccaataagcttcagccgaaaacttctgatagttccatttctttttagtcgagaaatcataacgtttctccatccattgcggttcgagccagaataagtcgcaagggacacccatctcacggaaacgtacagcatcattcaaaatatcgaattggtcttccagcatattcggaccgaaacacaatccgtatgcatatttcggcaacaagtaaggccgaccggtaatagccgtataatagttgatcacatcgggcatcgaattaccgaacatcaaatagaaatccacctcgtccgtcgtattatagattgagaaaacatccgactggtagttgccgatatcaaagaaatttttccgtgtcgtgttgttgaaaataccccaattttcggaactgatcataaaaggcatcggaatctcggtatgctggtaagtagtccacatacgcaacagttcgccccgatgttgaatatggtcgcgactggtactgccaccaccatagaaacgttcgccgtctttcagcgaaatcgaaaggatactggtgttcttgtaatcgccggtttccgcctggtctttcatgtttcccggatttttgtcgtcaccgatgatcgttccattgttggggactttcatgtccttgtatttggcattgatcacttctcccagctcaatgcacaacggatcggcagaagtaagaaagactactttctcgataatcacccgccctttccggtcagaaacagatatagcaccggtctttttatcaactttcagtcgataagcgccggtcgatacttcaaactgctgtttattgtctttcggggaaaccggaaccgggtcccaatccgtcttaataattccgtaacgttgcatcaacgactcagaaaaggttgaacgaggagtaacccgaatccggaatatcccatccgtacaaacttccacattcatgttcagcccattctgtaaacaaacatcgaatgactgtttctcccctgcagcaaaagcggattgcaggaaaaacagacatacaagcaaataatagatctttttcatgatatttaaaagttaataccacaaaaatacagacttcctattcgccttaccttcaataaatcatcttaaaacatagaattttgtccaatcttcagaacttcttcaactcttgataaagcagcctgaccggtaaccccatcacgttataaaaactgccattgatggcttcgactgccacgtacccgatccattcctgtatgccatagctaccggctttatcaaacggacgatatttatcgacatagtagacgatctcgtcatcatccagcctggcaaagcagacggtcgatgaagcggaaaaagaaaccgttttttcttttgtcgtaatacaaacaccggtaatcacctcatgtacatgcccagacagtttccgaagcatggcgatagcatcttcgcgatctttcggttttcctaaaatttcactgaaagtccacacaatcgtatcggcagtgatcaacaattcgtctgccgacatggaagagatgtaggcttccgcctttttcctagcgatatagaccggaacctcgtccgaccgcaacgttttgggaaaggattcgtctatatccgggatcgtctgtacttcaaagtcaatatccaatcccgccagcaattcgcgtctccggggagaattggaacctaatacaattttatattgactcaagttagggagtatgcttttcattatcctattttatcagtttagttctaccagccgaaagcctcgtcacccatccagtagccttgagctctcatgacttgttcgattacatcgcgggcaacgccagcccccccattcttgtgggagatatatttggcgatacgcttgatctcaggagccgcatcagcgggtgctaccggcaggccgaccattgtcatcacttcgtagtcaggaatatcgtccccggcatacataacctcttcaggctgcagaccagtcttttccagaaaatcccggtaatcgtggacttttactgcactcttcatatatatatgagtaatgccgagacgcgaaaagcggatctgtaccgcttccgtatagcctccggtaatgatggctacgtgatagcctttcttgacagcgagctgcaaggcatagccatcttttatattaacggtacgcatagggtcgccattcggatgcaacgggattacatcacaggacaaaacaccgtctacatcaaagacaaaagcctttatcttactcagatcataattgatactactcatgttgtgcctccttatgtatgctttgactgatcagccggtagatcgaccgcatatcggaatcccccaacatagccaaatgtttattaatcacattctcatcatatcggatagccggaccagtctgtgccaccctcggcggcatcgtatgtatcttggctgccgtctcgtcgataagtggcaacaagacatcagccggtatatcctgttcttctaataatttaacagccaacgcataaatatggttggtaaaattacaggcaaaaacagctgccaggtgtaaacttttacgtttgtcggacgacaggaaacggatatttcccgaaagtttctccgccaaatgttgcaatttgccagcattttcagacgtattagcttcaagaaaaaaagggatcacgttgaaatctacctcccgtgttttactaaacgtctgcatcggatacaggactccataattggccgtatggccgttgaaaacatccatcggcatactgcctgccgtatgcacccacaagccctcattcggcctgacacgagcaatcacatccgccaaaaccgtatcttttaaagaaaagacatacaggtcagcatccgtatcgacagtttcgggatcagttgtccagggacagcccaacagagcagccagctgctgtgcattttccggcgtatggctatacacctgcccgatctgcatccctttgcgatgcatttcgagcgacaagcgcgtcgccaagttgccagagcctaaaaaaatgattttcatactttcccctgttcgttttcaattggcatacggaaagttccgagatgtatcttttcccattgcagatgcgattcgtcaaacggcttacgttcctgatccttatatccgataccgatgatggacaaaacgtccagttggtaaggaacatcgagaagtcctcgcacatactgcgcggcgtccgtatcgtcttccatctgccggttgcgtatttggcaccaacaactgcccagtcccaaatcttcagcctgcaattgcatatagatggaggcaatcgaagcatcttctacccaaacatcgctttccattacattcgccagtacaacaacagccaacgcgcaatctttcaggaacgcagcacctgccggtttgcatactgacaacttggccaacatttccttatcctccacgacaacaaactgccagggatttttccgtttggaagccggtgccatcaaagcggctttcaatatcatttccacctgctccggattcagtaactgattcgtgaatttacgggtacttcttctgctctttattaatgttgcgaaactttccatttatattttactttattgattgcgaaagagaaaacaaagataatgagattttcggtacaaaaaaagccccttttcctctgattgatcaaaggaaaaggggctttcagaaatcagccggctttattcccagcctcctcctaacgctttgtaaagatagaccgttgacagcagttcgtcaagcatcgccttgttcagactgagttgggcgtcaagcaaaccacgctgggcatcaagaacgtccatatagctggtgacaccgttgatatactgcaattgtgccagctgaaggtaagtatcagcagcattgagcaatttctcgtatgacatgcgaacctcctttgccttgcggatcgtgacaattgcattgttgacttccttaaaaacactgagcacgctcttctggtaattatatacttcctgctcatagcgagcacgggccgccttcagcttcgctttgttcttacccatagcaaacaacggttgcagcaaatcgccagcaaggaaccaagcaggactcttaatgaaattcgtcagttcttcgttttcaaaacccaaattaccagtcaagctgatctttggaaaaagatcggtttgagccacccctaccctagcattcgcttcacgcagtttctgctcggcttgccgcatgtccggacgccgttctagcaaggaagaaggcaaaccgaccggcaatgtctccagcaaatgctgttcacgtaaaggcaatccacgcgggatatcccccgaatactgtccaagcaggaaagcaaggtcattctcctttattttgatcttctgttcaagtgaaggaagcaaggtctccgtacgtgccagttccacctgtgcctggctataggacgtctcggaagtcagaccaccttcgaagcgcagtttggctaagcggacgccttcgcgacgggcagccaatgtatggcgtacgatatcttgttcctgatcgagtgcacaaagttcataataagcagcagccacttccgctaccaatgtcatctgcaaggcgtgacgtgcttccaccgattgcagataggcagcaattcccgcttcgtttgcccaacgaagattcccccacaggtccaattcccacgagagagccagtttggctccgtattcaggatcaggttttgggttatcacctccgtaattcaagcgttctttctgtccataaatccgggctcctatttccgggaactgatcggcaaaggtgatccgtttcgaagcgatcatctccttaaccttcgcaacagcgatcttcatgtctttattattatcgagagcgatggtaatcagacgctgcaaagtcgtatcgacatacaggctctgccaagagatgctgtctatcgaagctgtatccgctcctgccacaatctcttccggaagatccagttccggacgagcgtacttcttgccgatcttgcaggaaggaagagccaacgcaagggacaggactatgaatatatagatatttcgtttcattgtaattatttgcttattgttcgatgaagaatacgttccattctgactttaccttttatcttgtaaatcaagacaaagaagaaaggaaccaaaacgatcccgactgtgatagcaactagcatcccgaaaaacacaccggtaccgatactgtggcgtgaagcagaacccggtccgcttgccaataccatcggaagcatacccagaacaaatgccaatgaggtcatcaggatcggacgaaaacgcattcgggcggcatgaagggcagccttgacaacctcaactccagaatcgacctgtattttggcaaactcgacgatcaagatcgcattctttgctgccaaaccaatcaacgtcaccaaaccgatctggaaataaatgtcgttgtgcaggcccgtcacccatattccaaggtaagctcccaatgctgcaaccggcaatgaaagcagtactgcgatcggtacgatccagctttcatattgggcagctagaaaaaggaagacgaaaagaaataccagcgccaacacgaatccagtctgtccaccggcctttttttcctgataagaaagtccgctccattccagcccgatattctcaggcagatgctcgcgggcaatccgctgcatagcggccattgcttcgccagaactatatccaggagcggcaacagcactaatagcagcagtcgtaaacatattaaaacgtttgatcgttcccggtcctgttgtatagctggtcgttcctaaggctgttaatggaaccatcgaaccgttctgtgcacggacaaaaaacaggccaagattatcacgcgttgcacgatatggtgcctccgcctgaatatataccttatatatacggttgaacatgttgaaatcgttcacgtagacggaacctaaataagctttcatagttgagaagatatccgtcaacgggataccgagaaacttcgcgcggtcgcggtctacattgaagtagagctgcggaatctccgactgcaaggctgaggacacacctgtcagctccggcgcttgtgatgcatagagcataaaagtgtcggtagccgccactaagttttcccaactggcatcaccacgggcctcaagttgcatttccaaacctccgctctctcctaaccctggaatcacaggaggacggttcagataggccaatatctccggataatataagaactctttacggcattgttccattacatcttccactcccatgttggaagatttgcgttcctcccaaggcttcagaataacggtcagggtagaacggctctgcgaagttccgacacgtgcgctgctaccggtcacattttgcacatatgcgacagccggcagactttcaatgaaagcgatggctcgatctgtaattttacgcgtacgttccaaagtcgccccttcgggcatcaccagttcgacagtaaagaacccttggtcttcttcaggaataaagctggtcgggattacccgattcaacacaaagatgaacacgattaccattccgaaaccggccaggatgcgccttggattccgaatcgctttttccagtaaatggccgtatttattatttcctttggccaaccaaatattgattttacggaaaacaatattttttttcttcctgttcggacgtagaataatcgcacacatggcagggctcaacgtcaatgccacgactgtggataacagtacggaaactacgatcgtaatggagaactgacggtacaaagctccagtaattccgctcaaaaaactaacaggaacaaacacggccgccaacaccatagaggtagcgattaaggctcccgacaattcgtgcatggctttatgagtagcctcgcgtgccgtcagatgctcttcatgcatcaaacgttccacgttttccaccacaacaatagcatcatccactacaataccgattgctagaatcaaacctaacaaagtcaacatattgagtgagaaccccatgatcagcataaaaccgaatgttccgatcaaagagataggaacagcaattgtcgggatcaaggccgcacgccagttctgcaaagataggaataccaccaatacgaccaagaacagagcttcaaataaggttttatatacctcgtggatagactgcgatatatattcggttgcatcgaaaggaaacttatattccaacccttctggaaaattctggctgatttctttcatcgcctcctttacattcgtagctacttccagtgcattggctcccggcaacatatagatagcaagtatagccgcattttttccattcagtccactttccgtcgaataagaagaggcttcaagtgaaactcttgccacatcacgaatacggacaatagagccgtctgggttggcacggactacaatatcttcgaactcctttaccgtagacaaacgtcctctggcagtaacaggcaaagtgatatcgacatccaatactggttgttttcccaactcaccggctgcagactcgctattttgctctttcagggcattttgcaagtcctttactgtcaaccccatattcgccaaacgatccggataaacccagatttgcataccgtaataacggctaccgacattcgaaacacggcctacaccgggaatacgacgcaatacatccaacacgttaatagtcgcaaaattactcaaatagatttcgtcaaaacgaggatcatccgaaagtagactcaatgtcatcaactgactggctgattgtttttctaccgtgataccgttctgcacaacgtctgctggcaaacgagactccgccagtttcacacggttctggatctctactgccgaaaggtctggattcgcattcacatcgaatgttacagtgatagtcagacctcccgaattagagctactgctttgcatatagatcatacccggcgtaccgttcaactcctgttcgataggagtcgcaacagcctgcgataccgtcatggcacttgcacctgggtacgaggcgctaattttaacaaccggtggagtgatctgcggatactggtccaccggcaacatcaccaacccgataatcccgacaataacaattaccaaagaaagcactgtcgagaaaacgggacgatctataaaaaatcccggtttcattcctcttcctcctctgcccttaatgcttcaatcgctttatcgtcacccgcctgtatcggctgtaccaacattccgggaactaacttatgatagccttctattacgacttgttcattttcacccaatccacgttctataacaatgttatttccgatttccggcccagtctgcacaaaacgcttttctgctacattatcccggcggactacataaatgaaagctcctcctttctctatggaaatagccttacggggaacaacaatcgcacgttcacggacatccaacaagagtttcacttttgtgaactgccccgggagaagtttctggttcggattggaaagttcagcacgcaccccgaatgttccagtctgcggatcaacaatcggatcggcaaaatccactatccctttaacaggatattcggaatcatcggctaaggtaactgttacggtcggttgccaggagcgggatgtgtcctgctctccgaatttaatattacgacgttcggcacgcagataatctaatgcagtcattttaaagtctactaaaacagtatcactctttactacagctgccaatttagagtttacaccaggaccgaccaaggcgccaacatccacaaaacgttcgctgatatatccggccagcggagaggttacagtcgtataactcaattcaagttgggcctgatccagatcggctttactcatggcaatatccgcctctgcatctcctaacgatgctaatgcattgtccaaatccaattggctggcagcatgctgctcgtacaaaggctgcaaacgttctacatcgcgtttagcttttgcagcttgtgcttcgttctttttcagctgtgctttagctttctctacctttgccttataaagagccgaattaataatgaaaagaggttcattctgcttaacttcctttccttccacaaacaacatcttttccagataaccctcaacgcgggcatgtatctccacgaaccgagctgcccgaatgcgtccgacatattcaccaaagatctgtacatcttcctttgccggtttatcaacaatcacgagaggcttcaaaggttcatccttatgtcggcatcctgttgctaacactatcaaggctaaaaacacagcccctttaaccaatctttctcctaccatcttctaatatctataattgacatttaaacttgctatatatatctatctctaaattaagacatgaaataatcgtaccactgtttcaatcaagatgctaaaaaacattatacagcttatttataagataataccttctatacaaaatagcttgttacctaaatcacaatccatatatgtagaattattccacattcttcctaaaaaaatccccaattatgacaccaaaacgttacccaataccaaacagtcctccggaaagaatccttcaacatataaaacagaaaaaggagtcaggcttacgactgactcctcctcttagagaactttcgctctcactcctaaaaaacggcggctatctactctcccacttttacgcagtaccatcgacgtggttgggcttaacttctctgttcggaatgggaagaggtggatccccaacgctataaccaccttaatacctctttgtaagattttgactggacaaccccattacctgaagtaactaatagaaacatatggcatcagccacctgctgatatatcaacccttacatgatcgaaagtctcgggctattagtactactcggcttcgacattgctgcccttacacctgtagcctatctacgtcgtagtctacaacgaccctctagggatatctcatcttgaggctggcttcgtacttagatgctttcagcacttatccaatccagacttagatacccggcggtgcacctggcggtacaaccggtaaaccagtggtctgtccaacacggtcctctcgtactagtgtcagagcccctcaaatatcctacgcccacgatagatagagaccgaactgtctcacgacgttctgaacccagctcgcgtgccactttaatgggcgaacagcccaacccttgggaccttctccagccccaggatgtgacgagccgacatcgaggtgccaaaccgctccgtcgatatgagctcttgggagcgatcagcctgttatccccggagtaccttttatcctttgagcgatggcccttccatacggaaccaccggatcactatgctctagtttcctacctgatcgacttgtctgtctcccagtcaagcacccttatgccattacactctacgaccggttaccaatcggtctgagggtacctttagaagcctccgttactcttttggaggcgaccaccccagtcaaactacccaccatacagtgtccccgcttctgcgggttagaactcaaacaaccaaagggccgtatttcaacggcggctccacaaacactggcgtgcctgattcatagcctccggcctatcctacacatcgattgcccaaattcaatgtaaagctatagtaaaggttcacggggtcttttcgtcccatcgcgggtaatcggcatcttcaccgatactacaatttcaccgagctcacggttgagacagtgtccagatcattacaccattcgtgcaggtcggaacttacccgacaaggaatttcgctaccttaggaccgttatagttacggccgccgtttactggggcttcaattcaagccttctcttgcgatgagctctcctcttaaccttccagcaccgggcaggtgtcaggctgtatacttcatatttctatttcgcacagccatgtgtttttgttaaacagttgcctggacctattctctgcgccctacctctcagtagggaccctttatcccgaagttacagggtcaatttgcctagttccttaaccgtgaatcactcgagcgcctcagtattttcaacccaactacgtgtgtccgtttacggtacgggtactttatgaatatgcttagcggattttcttgggagcctgattacgtccattttgccttgtgcaagcacgcggcatactatcaaggtcgactctccctgcggatttgcctacaggaatctacatctacactcttcaaccacctattccgtcagatggcaggactttcacttctccgtctccacatcgctccataaagtagtatgggaatattaaaccattcttccatcggtatcgccgttcggcttaaccttaggtcccgacttaccctgatccgattaacgttgatcaggaaaccttagtctttcggcgaggaggtttctcacctcctttatcgttacttatacctacatttgcgtttccaaaagctccagcaaaggtcatccttcaccttcgacgccgttggaatgctcccctaccatgtatttctacatccatagcttcggtaaacagtttatgcccgagtattatccacgccggactcctcgactagtgagctgttacgcactctttaaatgaatggctgcttccaagccaacatcctagctgtctctgcagtccgacttcgttagttcaacttaactgttatttggggaccttagctgatggtctggattcttctcctctcggacgcggaccttagcacccgcgccctcactccttatcaatatatagcacgcattcggagtttatctggacttgataggcggtgaagccctcgcatccaatcagtcgctctacctcatgctatactaaataaaggctgcacctaaatgcatttcggggagtacgagctatctccaagtttgattagcctttcacccctaccctcagttcattggaacacttttcaacgtatacccattcggacctccagttggtgttacccaaccttcatcctgaccaagggtagatcacttggtttcgcgtctactcactccgactatcacgccctattaagactcgctttcgcttcggctccgggcctgaagcccttaaccttgccggagaaagtaactcgtaggttcattatgcaaaaggcacgccgtcacactttaatgtgctccgaccgcttgtaggcagacggtttcagggactatttcactcctctgttcgaggtgcttttcacctttccttcacagtactggttcgctatcggtctctcgggagtatttagccttacgggatgggccccgctgattcacacagaatttctcgtgctccgcgctactcaggattccactaggcttcgttaaagagtcgtataccgggctttcaccgtctacggccgtttgttccaaaacgttctacttccttaatctcttgccacaacgtggtcctactaccccgacaatgcctaaacatcatcggtttgggctgttccgcgttcgctcgccactacttgcggaatcacttttgttttcttctcctatgggtacttagatgtttcagttccccacgttcgccttccttacggaatgactggccttccaccagccgggttgccccattcggaaatcttgggatcaaaggttatttgcacctaccccaagcttatcgcagcttatcacgtccttcatcgcctccgagagccaaggcatccaccgtctgcccttgcttactttctttatcactgacactgcttccttttattgctaaaattgaagcccgtgtcggattgatatatcttcagcttgctctattttttcgttactttacttttttgaagttgtccaatacgtcaaagatctttttttaccccttacggagtttatcgtggagaataacggattcgaaccgttgaccctctgcgtgcaaagcagatgctctagccagctgagctaatcccccgtttttcaactggtagtcccaggcagagttgaactgccgacctctacattatcagtgtagcgctctaaccaactgagctataggactgtcaaccgttatgtgcctgaaattttcatctcagcatcatctttctctctatatactggtctttccagtttaagatcatatatatatacatattcaaccgtagtaccagagagctacatacctcatcggacttaatctagagattccagctccagaaaggaggtgttccagccgcaccttccggtacggctaccttgttacgacttagccccagtcaccagttttaccctaggccgatccttgcggttacggacttcaggtacccccggctcccatggcttgacgggcggtgtgtacaaggcccgggaacgtattcaccgcgccatggctgatgcgcgattactagcgaatccagcttcacggagtcgagttgcagactccgatccgaactgagacatggtttggagattagcatcctgtcaccaggtagctgccctttgtccatgccattgtaacacgtgtgtcgccccggatgtaagggccgtgctgatttgacgtcatccccaccttcctcacagcttacgctggcagtctcaccagagtcctcagcttcacctgttagtaactagtgataagggttgcgctcgttatggcacttaagccgacacctcacggcacgagctgacgacaaccatgcagcacctcgtaatctgctattgctagaaagagtgtttccactccggtcagactacgttcaaacccgggtaaggttcctcgcgtatcatcgaattaaaccacatgttcctccgcttgtgcgggcccccgtcaattcctttgagtttcaccgttgccggcgtactccccaggtggattacttaacgctttcgctgtagagcttacattgtatcgcaaactcctagtaatcatcgtttactgcgtggactaccagggtatctaatcctgtttgatccccacgctttcgtgcttcagtgtcagttatggtttagtaagctgccttcgcaatcggagttctgcgtgatatctatgcatttcaccgctacaccacgcattccgcctacctcaaacacactcaagtaacccagtttcaacggcaattttatggttgagccacaaactttcaccgctgacttaaatcaccacctacgcaccctttaaacccaataaatccggataacgctcgcatcctccgtattaccgcggctgctggcacggagttagccgatgcttattcatagggtacatacaaaaaaggacacgtcctccactttattcccctataaaagaagtttacaaaccatagatccttcttccttcacgcgacttggctggttcagcctctcggccattgaccaatattcctcactgctgcctcccgtaggagtttggtccgtgtctcagtaccaatgtgggggaccttcctctcagaacccctatccatcgtcggtttggtgggccgttaccccgccaactgcctaatggaacgcatgcctatctatcagcgatgaatctttaacaaatattcccatgcgggacccctgttttatggggtattaatccgactttcgccgggctatccccctctgataggtaagttgcatacgcgttactcacccgtgcgccggtcgccatcaatctgtattgctacaaatcatgctgcccctcgacttgcatgtgttaagcctgtcgctagcgttcatcctgagccaggatcaaactcttcgttgttgattttgttttataccttttgctcagaatctctatctgtttattgtagtcttgacggtatgtcagtattcctactacgtctcttgtactacttgttgatatgtaatgctttcaaagaacttgcgctatcgtttcgattgcggctgcaaaggtaagaacttttttctaactgacaaacttttcaaggaaaattttgaaagttttttttcaaagcccccggatggtcggatattcgcttagcctagctaacctcatcctcgctatcactgaaactacctcatcatcatgttaactgccgaccttctcgctcgaatgcgggtgcaaaagtaattcttctaatacaaacttccaaatggtttgaaaacttttttatacgttctttatctgaaatgagatattattatatggtacgcatgtgcgagaaatgatacagcattttttacaataacctactgtttttctatttcgatcctcaaaacggatgatttcaaattgacttttctctgctaaaatcctgctttttgtgacatacgcataaaagacctgcctacctcatctcaaaaccatatattttgtcaagcaagcctcccttatcctacacattccgataaaccttaactttcggagaatcgaatatttgaatccggacagggagaccgtacggaaacaggttagaaaatagtggctatttttgagggaccagacacctcatctccatgaagacggtcctcatcaatacgacgaccgtcttcatcgccgtgaagtgccgaactcgtcatacacaaagtcggacttcatagcaatgaagacggtcgtcatggcaattatctgcgcatcttacgggataaatcgtttttcaatctcttttaagcccgaaaaaaagtatgtcaaatgcaacttgattcgagcttcttttctgttttcaggatcactttaaacaataaggggaagcctgataacctattctaccgttaagacctgttcaccggatttgagttgatattcttttcctttccaaacgaaaacaccatccgtacccgtcggcaatataagacgtgccgtcagtttacccttcttatcgagtttgtaggaagcagtcacactacccactggatgcggcatcgtacctgacacttctttcaggtcacccaatgacggagcgatacggatagacttgaagcccggtgcattactgtctatacctaacaagatacggaaaaactcaatgttagggctggctccccaagcgtggcaatcggaacgggtcggttcgggcatctccgcccaagttgttagccccaatgccatctggtctcgccaaatctgcagattgtcgagcaggtgatctcccataccggcaaccttcaatgcctgatgcacataataacggaagtagattgtcgcctgtatcaatgacgaatcgttcaatgtacgctccatcaccctcgtagcctcctcgcctgtcacgataccagccagtatagccaacgagttgacatgttgcgagaaacttcggtgatcataagtatcggcaaacaatccccgggtagcatcccagtatttctcccggatcgttccccgaatcgcagaagcgatctgtgtataatgatccgctatcgacgggatgccgaaagcccgttccatttcagcagccgattcgagcgtcaagatatacaccaagtcctgaaaagcagaattcccatccttttcacgtacaggctcgcccgactggaaaccggcagcccagtcggcaaagaaccaatgcggtacataccctaggctatgatctcgcttcaaccactgctcgtaccaagaaagtaccccacgataagcaggcagcaaagtcttcatataagcctcatccccacggtacatccagtagtcatgtcccatacaaatccaccaaagtgagaaggaagaaatgaactgatgtaaactcgacgggtagcgactcatcgtaattccatctgctacgaccgactgcctcccctgctcgattgcattcttcaccatataagcatcatgcgtattatataaggtaatcatcgcctggatacgagtatcgccgaaatactgtaactgctcataataagggcaatccatataagtctcgttcgcacaaagacgtgcagtacgccagcctatctctagcatcttgttcaactcgtcatgtccgggtgcagaaaaagcgatctcgcatcggaaaggataagcagagaatgtaccatagacatcttccagtacaagcggttcgtcagcagtcgagatcgtcagatccacatatcgccacgtacgccaccaaagagtggtaaaatcgcgcccctcgcccccgtcggcaatcactttatcttcataccctatgaatcttttaccttctacctcatcacggtttccctttgccggaaacgaataagatttagtcgtacccagctccttgccttcatacagagcttcggcataggcaatcgtaatttcagcattcttgccgcgactaaacaaaagggaaagatagcccgttgtcagcttgccattgtcaagcaggagatgcaccttgctatttgcaggaaccgtcagtgaagtttttgttttcaggaatccggcaggaatcttcaccccctcggatatacgcacagcctcaaaacgctcagacagcaagtccatcgggggaattggacaaggaacaagcaggcgtccaggatagtcgcgcgatcccttcactcctccctcgattcccgtgtgggcaggcaaccacttactatcatcgtaagcagactgttcccatccccaaggatacttcgacgcagaaagaagttcgccaggccccgccacataatagcctaagacaggcttgtgccaaggagcataggcttcgttcttcatgcacagccaggaagcatccgtattgaccacagtctcaacctccgtatttccttgtagaaggaatccagtctgattaaagctgatctgtgcaaccggcttctgctcggcataattccagatcacagctgccaacacgttttttccctttatcaggtaaggagccagatcgaccgtttcaaaattccagttatagatatccccacgtgcaggtccaagtgagacaaaacggccgtttaaataaagcttgtaacgattgtcagccgtcacatgaacaataaagcgggatgggacttcgtccagttcgaacgtcttgcgcatgtggtagacaccatacacattggcaggttctcctggcatggaaatccagtgtgctttccagcgtccggtaagaagttcgggattgatgtcagtttgtcggtaaccttccaaacggatctgggcgccaagcgacagataacaaagcataaaaagaaaaatcagtacacgtgtcttcattcgatacattggtattagatattaaacaaataaggatagaggcaaaagccgatccctcggttctgaaactgaatctccgtggaatcggctattaactgatattttagaaaatcaaataaacaactccggttcgcggcggacactaaagttcttatgcagcatcgctgtataaggagtatcaaacgtacgggcaccttcgggacattccttcacacaagcacaacacttgatacaagtcgccgggtcactgaacatacggtcatcgacaatcgaaatagccgatacggggcatacatcgatacaatattcgcattgcgtacacaagtcctcatccgtcactggagcctgcggcgtggaagggcctttcaccttgtagggaaaattacctttcatctccaacggcttcaggcaagaaagttcgtccaccttttcgagcttctccttgatggcacgtccgaacctgacggcagcttcatgatcggcctcatcgggacgcccggcggcgatgggcatatccttacggctgaaagaatgctctcccacaaaagcacctgccgaaacagggacaaaaccggcatcgactaacgtgtcggacaattccttcaacgcatcctcgtaatcacggttaccgtaaaccacgaccggaacgaccggagcctgatgagcatggaaagcccggaggcgctccatcgccgtttcggctacacgcccaccatagacgggagcggccacgatagtcagttcatcgtcatggatctcaagttcttccgccggagcatcataagtaatgtccgactccagcaatacgtcaccactcagtccttccgcaatcgcataagcagtcttagccgaagtatgcgtcggagagaaataaatgatatgtacattcttatattccatattccttattttaaagctgcttcaatccttttcatcagttcagcaaattcctcgtcgctatagcctttggtcgcatataccactttaccagtcttgtcaaccagatagctacgcgggatcagatttttggcaaatgcgccatagatagcccggttcttatcaggatataagggaaaggtaaaacctttcttttcgttatacttctgcaattcaacgtctgtatgctcacgcccgatcaccaacaggacgaaatctttgttgtccttatacttcggccagagcatcttttgcacctctgcaagctccttctgacaaggaggacaccaggttgcaaaaaaatttaccaagatcacttttctcttcaaagaagaagaaggcacctgcgtaccattgtcgttcacaatcgtaaaagccggcatctgttgtccttcttttacaagatcaccactctcatcctgcgcctttacaacaaaagcaatgagagcaaaaaaggcaaggaatacatactttttcattttattacttttgcatgctctgtgctacatcgtagcctgctttcagagccttaaggttcatttctacgatttcttcgcctttacgtccgaagatgcggcggataccatcagcaatcttatcatattcgatgccaataaagggggcagcggctcccagcatcacgatattggccgcacgaacggaacccacctccttggcgatagcttccacatccagcacgaccttatgcggcagtttctccagttcttcattcacatttcccatctccggatagttggggatgttgatgaacggctgcgaattggtcaccagccacccgtccttcttcagataaggcagatagcggagcgcctccataggttcgagcgagatgatcaggtcagcctgtcctagtgggatcaggtcagacgcaatcggctgatcggacaggcggaggtttgactgcacatcccccccacgctggctcattccatgaacttcggcttgcttcatatacaaaccttcttttaacgcggcttctccgataacggcagcgatggagaggatgccctgtcctcccacaccggataatatgatgtctgctttcatttcctgcttgcttttttctttcttgttaatgtctggatacattcacgacggggaatcaagacggatacgcctttatattcgatctcttcacgaatgatcgctttcatctcgtcgtagttcttcttcaaaggaaccatgacgcggatatgggccggatcaacaccgataccggcacaaatcgattcgatacggcctgttcctgctgaatcctgtccgccagtcatagccgttgtctcgttatcggaaataacgatcgtgatattcgtgttttcattgacgcaatcaagcaagccagtcataccggaatgcgtgaatgtcgagtcgcctatcaccgacactgcgggataaacgcccgcatcggaagctcctttagccatcgtgatggaggctcccatgtcgatacaagtatcgatcgcccggaaaggaggcaaagcccctaacgtataacagccgatatcaccgaacactttggctcctttgtacccggacagaacctcgttcagcgcttcatacatatcgcgatgtccgcacccctggcacaatgcaggcggacgttgttcgacaacctccggagtggcatagtagctctcgatccgcttacccagcgccttaccgacagcatcgggagtcagctcaccgtcgcgttgcaatgttccgtcaagacggccatgcacctggataccaattccaaggaaacctttcagttgctcctcgactaccggatatccctcttcgagtacaaggatttccttgcattcacggacgatcttttcgaccattttgcgaggtaacggatactggctgatcttcaataccggatgttcaaaaccgtcaggatagttctccgaaagatagttgaacgaaataccggtcgtgatgatgccgagctccttattcggaccgtcgaaataggcattataaggtgaggcttcagaagaagcggtaaacgtatcctgcgccgcaatcaacgtcttaaagcgcttacgagctagtgcaggaagaaggatgaaacgctgacgtccatcttcgggcgtatgcattttgttttccaccttttgttcacgtctgaccacacctgcacgggagtgggccatacgggtagtgatacgcaccaaaacgggatagcccagtttttcggataattcaaacccgtcatataccatgtcgtatgcttcctgctggctggccggctcaagcatcgggatcatggcaaagttgccatacatacgattgtcttgttcattctgtgaagagtgcatcgaaggatcatcggctgtaatgataatcataccaccattgacaccgctcatagcagcattcataaaacagtcggcggcaacgttcagccccacatgcttcatacagcaaagagcccgcttgcctgcgtagctcatacccaacgcagcttccattgcagttttttcattcgtgctccaacgacagtgaatccccctttcctttgcgacggccgaaccttgtatgaattcggttatctcggtcgaaggggtccccggataggcgtaaacaccggacagaccggcatcgatagcagcttgtgccacggcctcatcccctaaaaatagatgtttttccatgtaacgtttattttgttttacttgattttgcttctgttatcttcccacaaagataagacttttacccatacccgcaacaaccgagctatattggatttttagtttcataggcatgatactgttgtttccctatggtggaactctcgtttccttataatggcactgccgtttccctataatgaaacaatcgtggcataccgggaaaatgtttccatattgcctaccggattttccgtctgttcaattccgcccggtagcggttagcattacgattatgctcggcaagagtgaccgcaaaattatgccgtccggaaaaatcttccttcgcacacatatatagatagttatgcttcatgtggttcaacacggcatccaatcccctaatagtcgggatacggagtggtccgggaggaagtccggcatgtttgtaggtattgtagggagaatcgatctccagatgttcgaacaggatacgttggagggagaaatcgcctacggcaaacttcacggtcggatccgcctgaaggggaatgccacgctgcaagcgattaatatatagacctgctacaataggatattcgtctacggcagccgtctcttcttccacaatagaggcaagaatggcaacttcgaccggtgtcatcccaatttctttcgcttttgccaagcgagcgtcattccagaaaatcttatattcacgctgcatacgctgcatcaacttctcagcggaaatattccagtatacctcataagtattcggaataaacagcgcaaggatcgtctcagtcgtaaaacctaatgatgcacagtagacggaatcaacaagcaaaggtagcaggtcatcctcctcgatcattaactgcccggcaagtctttcggccagatccaacttgaagcgtatattattaaaagtgattcgagtagcttcctgatgcccccgacgcaggttgttaagcaatgccaggttattcatacccggctccacagcataacgtccggtacgcatattggtgggatatttcagcattccggcaagctgcttgaaactcccgatacgccggcaaccggcagagtcgaccaactggcgacagagatcgccaaaatctttcttctcgtcaatataaacatatacagtcttgcgcggctcgaaatcaggtgcaagtatcaaacagtatgcccagaatcccacacctgctaacaggaggatgataaacgagaggattccaacaatgagagtatgctttcgcatcttttttttctccatattatatatagtctgctgtatctcagaaccggccacaaaaataatatctttttcccgaatgccctacctctttctaacttattccaagcattgcaatcgggaagaaaaaagtgttcacttttgtaggattgaaaacctctgattgccaatcatgtgcaagaataagtcttttttcttttaaaataatacaccaaatgctttgtatatttaaaaacttaagcatatctttgcagcgcaattcaaggaaatgaagcgcaaaactcatggaagtgtgggtgagtggctgaaaccaccagtttgctaaactgacgtacgggtaaccgtaccgggggttcgaatccccccgcttccgctccaaaggctgtcaattgaaaagttgacagcctttgctgttttaaacccacacaaaaaaacgaaatcacaaaagaagggatcccggatcataatccgggatcacaccggaaccacaagggaaaacaaacaaaaaaaggctgccttcacagacagccttacgggtgaaaaatgggactcgaacccacgaccctcggaaccacaatccgatgctctaaccaactgagctattctcaccatgtttatcttatcaagtgtttatctctttaagacggtgcaaagatagaggttttattttaaactgcaaataattcgagcatttttttattcaaaaatatactcttcgacctccttattgttaccttttaaaaacaaacgcgtattatttacatacttaatcaatgctgaatcgactgaaaaagaggaattttgattctttcccaaccaagaggccgccggaaccacccgaatatcttcttttccttgttcattcttataacgggaagaataaatcaacgaatattgtgcggaaacaatatatcggcgcaaccccttccgacctaaaacgactttcaccatgacacccccatcggtatgttcccggctcatgttcgatataaaattacccaatgaataaacaaccagacggtcggtaacttcctcctttcccctgcgaagctccattggctgaacaacatgagggtgactgcctatgaccagatcgacaccctgccgcaacagccaatcggccagttcacgttgttcacgggaaggtatccgttcgtattccaatccccaatgcatattagctataataaaatccggattaaagagcttggcttcggcaatatcacccttcattatctccttatcgatataattgatgattcggggtatatcgactttcaaaccgttggtaccataggtatagttgagcatgatgatacgaaaatccttcttacggagcaacatcggatatgtgcggtgacggtgatcacagtcaagaaaggttccggtatgacggattccgagagaatccagtgcctggatagtacggacaaatccgcgagtccgcctatctaaacaatgattattggctaacaagaagaagtcgaaacctgctttttgcaaagccaaagcgaagtcttccggagcgctgaaagccggataaccactatatggctcccctcctaacgggacttcgaagttcacaacagcaatatcggcagatttcacctctctctcgatattggcaaaatagctacccaaatcaaaaaaatctcccctccgggtattgtcaagttgtttctggtgcatcatggcatcaccggcaaacaaaattgtcagcgagtcctgagcagataaagacagaaagctcaaaagacaaaacccggagaggaggattttcatttataaatctctttctttccggctaaaagcgtattgcgcatcaaagaaataatcgtcatcggacctacaccacccggaaccggcgtgatataagaacacttaggagcgacctcgtcaaacttaacatcgccagtcaacttaaagccgcttttgcgagttgcatccggcacacgtgtcgttcccacatccacgatcacagccccttcttttaccatatcgcctttcaggaattcggggacacccaatgccacaataataatgtcggcactcaagcacatttccttcaggttctcggaacgactgtggcaaacagtaaccgtacaatcgcccggataggctttctgcatcatcaaagtagccatcggtttgcccacgatattactacgccccagcaccacgcaatgtttaccgcgagtaggaatctcgtaacgcctcaacagctccaagatgccagccggagttgccgacacgaaacaagggagaccgatagacatacgacccacattgatcggatggaaaccatctacatccttacggtagtcgatcgcttcgataatcttctgttcagagatatgtttcggaagcgggagctgtacgataaaaccatccacgtccggatcgttgttcagttcgtccactttgcgaagaagttcttcttcggtaacatcggcttcataacggatcagagacgatttaaaaccgatctcattacatgtcttgaccttacttgcgacatatgtttcacttcctccatcatgaccgaccaatatggcagccaaatgagggattttaccaccggtagccttgatacgggccacttcttccgccatctcctgcttcatctgagccgaaacggcttttccgtccaatagcttatactgttgttcttccatattctctattatcttttcaggttttatcttctgaatgaaggaaatttcttgcttcccggtttggcagccgtcagcatacgcatcatcttgcgcgtttcatcgaattgcttgatcagcttgttcacttcctggatcgtcgtaccgctacctttggcaatacgctgacgacgtgaaccgttcaggattgccggattcgtacgttcttcgggagtcatagagtagatgatcgcttcgatgctcttgaaagcattgtcgtcaatatccacatccttcagagccttgcctacgcccggaatcatagaggccagctctttcaggttacccatcttcttgatctgctggatctgagaaataaagtcgttgaagtcgaactgattcttggcaattttcttctgcaagcgtttggcctcttcttcatcatactgctcctgcgcacgttccaccaaagaaacgatatcacccataccaaggatacggtctgccatacgttcagggtggaagatatccaaagcatccatcttttcgcccgttccgacgaacttgatcggtttgtcgaccaccgttcggatagaaagagcggcaccaccgcgagtatcaccgtcgagcttcgtcaggacaacaccgtcaaaatcgagacgctcgttaaattctttcgccgtgttgacagcatcctgcccagtcatggaatcgaccacgaacaaggtttcatccggctgaatagcactcttgatcgcagcgatctctttcatcatctgctcgtcaatagccaaacgaccagcggtatcgacaatcacgacatcgttgcctttcgcacgtgcttcgcgaatcgcgttcatcgcaatctccaccggattcttgttttccagttccatataaacaggtactccaacctgttcgccgaccacacgcaactgctcgatagcggccggacgatacacgtcacaagctgccaacagcggctttttatttttcttagtcttcagcaaatttgccaacttacctgaaaaagtcgttttaccggaaccttgcaaaccggacatcaggatgattgccggactacccttcagatccagatcggtagccgttcctcccatcaggtctgccaactcatcatgcacaatcttgaccattaactgactgggcttaacggatgtaagcacattctgtcctaatgctttcgcctttaccgtatcggtaaaacctttggctactttatagtttacgtcggcgtcaagtaatgctttacgcacatctttcaatgtttcagccacattgatttccgtgatcttaccttcacctttcaacagtttaaacgatctgtctaacctttcgcttaaattctcaaacataattcgtatgtatatttattttattctattttctattcttcgaatgagaggcaaaggtaagaaaaactgacgaataaagaaaagatcacaaattccgagtcagattttcttattttgccaagatgctttctttaaataaatgacacttgcgaccaataaaccggtataatacaccacctcggtcatgaaacagatagcaaccggcatatgcaagcgcattccgaccacatatataaacaatgtatagaaaacaagggtagccaactccatcacaaaagccgaacgagtatttcccgtacccgtcactccgttgaacacgatattggcaaccgctccgatcagcaaagcgcctgaaatcacataaagggaagggatcgaagcttgtatcaaagtcacgtcattggtataaaccgataatatcgtagaaggaatcagacaagtgacagacacaaaaacagccatgattcctaacgatatccaagttatatgacgaatgatcgggataacctggtccttatgccccgccccgatgctgttactcacaaacgtattcgttgccgtcgataaagaattgacagggatcaataaaacgatgtaaacactccggacaatattcgcaaccgccagttctcgcagccctaaatgttccacagccacaaacaacatgaaataagtactgagcgaaataaaatattgcaacatcgtaaatatagagatatccaacacacgcctcagcaatttaacatcgaacgatcgaaactggctcagtgcatacttcttgatatccaccgtcatccgagtataaaccatataaaacacgatagacaccgcctccgccatcaccgaagcgatagccgctccttttatacccaattccggaaagccacagttaccgaatatcaacaggtagtccagcagcacattcgtcaacgccatcacaacagcattcagtgtcagcaccttcgtccgggtaataccgataaacaaagcacggaacatcacattcacaaaagagaaaaagaacccgaacacacgccagtccaagaattcttccgtggcattcagaatcgtatcggaagaaatcagtacccgcataatatccccggcaaacagacgtgacaaaataaacatgacggcagccaacataagcaggaaaaagactccctgtatcattaccggcccaacttccttataattccgctccccattacggcgagccatgatgatctgcgatccggtactaaacccaaaagcgatcgtaaaggcacatatataatacaagccgcccattgccgaagctcctaactcgatttcaccgacccggcccaaaaacgcggtgtccgtcacattaatgacattctgtgccagaagactcaaaaagattggataactaacattccaaatttgcctgtttgtgtacatattaatattattcacgaaggaaatccatactcataaaaaaagcccgccacatcaggcgagcttcttctttatatgctatcgcatttatttttcagctaccgatgcttcaatcagtttattggttgccgtatcaggaaacacaaccgacggcttaaatgttttcgcctcctcaaaatccatcaaggcatacgacataataatgatgatatcgccaggttgtgctttgcgtgcagcagctccattcagacaaaccactcccgaacctcgttcacctttaatgatatacgtttcaaaacgttcaccgttattattattcacaatagcgaccttttcgttggcaatcagattggcggcatccagcaaatcctcgtcaacagtgatacttcctatataattcagattggcttccgttaccgttacccggtgaatctttgatttaactacttctataaacatacgatctgatttatgatttatgatttatgaattatttagctacgcttgtttcttccatataaaacttatgattattcaggaaacaaatcatcattcataaatcataaatctatatttagtacttaatattatctatcagacgaacctctccgcaatataccgtaatacatcctaccggataagtcgtatcggaccagttcttgatggactccatcgtattgccatctacaatctcatagtattccacacgcataataggatcggcatttattgtgttgacaacatagtcgatcacctcctgcacactcttttcgggcacaaagttagcactttcttttaacgtacgagctattaacggagctttttgacgttgttcgggtgtcaagcgcacattacggctactcaatgccagaccgtctgcttcacgcaaaatcggacagtcgttgatctttaccggtatatccagttgtttcaccatagcacggatcacagcgatctgctggaaatctttttcaccaaaataggcattatccggttcgactacataaaaaagtttgctcacgatctgagcaaccccattgaaatgtccgggacggcgcgccccttccattacggccgaaacagtgccgaaatcgaatgtgcgggtatctggctccggatacatttcttctgccgacggcgcaaatacataatcgcaaccgaccggctccaacagagtacagtctttatccaacgtacgaggatacgtttcaaggtcgtgcttgtcgttaaactgggttggattgacaaaaacactgactacacacacgtcattttctttcacacaacgttcaaccaggctcaagtgtccgtcatgcaatgctcccatagtgggaacaaagccaatttgtttgttattacgcttttcttcagcgagataactcttcaattctttaatactgtttactattttcatcctttagatgcttattgacggtgcaaagcaaataaataattgcggtaaatgaaagaatttttgtatctttgtagcgtctttataaaactagtttacagaatggatgcaaaaaaaatcttgtttatagctcaagaaataacaccctaccttcccgaatcagagattgcaacgatatgcagaaacctgccacaaggcatacaggagcgtggtcgcgaaattaggactttcatgcccaagttcggtagcattaacgaacgccgcaaccagttgcacgaagtaatccggctttcgggtatgaatctcatcattgatgataccgatcacccgctgatcataaaggtagcatccattcaggcagcccgcatgcaagtatacttcattgataatgaagatttcttccaaagaaaacatactatcagcgacgatgatggaaacgaatacgaggataacgacgaccgttcgatcttctacgttcgtggtgtattggaaacagtgaaaaaactccgttggataccggacgtcattcactgtcatggttggatgtcagcgctaacagccctgtacatcaaacgtatgtatgctgacgatccttgcctcaaagatgcaaagatcgtatactctatttataacgatgacttcaaaacaccgttcagaaaagaatttgcaagcaagttaaaaatggatggagccaaggacagcgacctgaaaggcatcaaagccgatacaagcttcaccgggctgaccaagctcgccatcgatttcgcagatggtgtgatacagggtagtgaaacgatcaatcaagatgtgttggattatattgccactaaaaagcacactccattcctgccttatcagtcgccggacgtttatatgaataaattcaacgaattctacgatgtcatattaggcacaaaataaatttagagacatgaaaatcaagctttttatacttggcctgagtctcggaatctcgattctgagcgggtgtaatgatgatttgacgcaggtaggaacaggtattcaaccggagaatgacagaccgctggtatatgcggacacattttacatgaaagcaaaaacattacagactgattctgtctatgcccggacaatttacggttcattaggggaaatatacgatcctttgtacggaaacctgaagtctgattttatgtgccagttctactgtccggaaaatttccggttcaggtatacaccctacaacggcataatagattcggtcgaatttaaaatatattatagccgaagctggacaggtgattctctaactccgatgcgtgcacaactatacgaagtaacaactccgctaacgagagatttttatacgaatatcgatccggaacaatactgcaatatgcagaaatcattaggtatgcagacatatacggcacgtgatctaagtgtttcggactctctttggaatgataaaaattcaaataacgtactgacttatcaaccgagaataaccatccgcatgccccaggaagtaggtcaacatttctatgacgcgacaatcaaaactccggaagtttttaatgaccagaatacgttcaatcagttctttcccggtatttatgtcacaaatacatacggtacaggaaacatcctgaacattgaaagtacccagatgaacatttactataagcacacggtaaaaggctctgccgaccaggattcaatcgtacaggcttgggagactttcagtgcgacatctgaagttatccagttgaacagattcaagaatacagacatcagccatctgctggaacccaatgatagcatcgcttatctgaaaagtccggcaggcgtatatacccagttgacaatcccggcacaagatattgctcctattatccaaggacgtattgtcagcaatgtggacctttctttaaaagcccttccgcaagaagactggaaatttgcatttgaagctcccgctaacgtgctgatactcccaaaggattctatggatacattctttagaaacaataatgtagaaaataacatcacctccttccggggatcttatgtggcttcgacccgaacctactcattcggaaacatagccaagctgcttaaaacccacatagagaactctccggatgaagatctggttatcaacgttatccccgtacagcgcagagtaggaacgacaaccaactactacgggcagacaagcgaatacactgtcgccatcgagaactatttgaaaccttccggtgtaaaactacgtatcgacaaagacgcaatggaaatgcgtatcgtaacaattgaatatagataagcaagactgactgtttattatctatcagatataaaaaagaaggtgtgtcgtaatacccgatgcgccttcttttttttcgttgactataaaaatcggctcatttttttaagctgcgacattttgaggatttcttcgatttatgtgttcccagcatctaaatatagctactgtaagctcataaaacagtccagtcagccaatccataccttctttagccatttttgcacatatcttttttatattgaaggcaatggcaaagaaggaaaagtccatgaagaccttatcctttccaaaatggcggaaacgtttgtaattcatattgtttttaatttgtccgaacacggattccggttctatgcatctctgtcctctgtgtttcagcccttcctcggagcagagcagctctttggctttttgcctgtattttctgagcctgtgattcagttctatcgtcctgtttccttttgctttaaaacaacggcatcttagcggacagccttcacatctgacggctctgtacctggcattttcgctgacatatccggatgcggttttcacatgtctggtacctatcctccgcatcctttgtcccatagggcagatgcaaaagtcatgttcttcattgtagtagaagttttctgccttgaacggatccggttggaagctcggccgctgctccatgtggaaatagttatatttgacgtaagcttccatgccgttctctgacatgaagcggtaattctcctcagaaccatagccggaatcggcaaccaccgtatgagccatccggtcatacctgtttgaaaaagattgcaggaaagggatcatggtcagtgtatccgtagggttcgggaagagtgcaaaatcggtgatgaactggttctcggtgccgatctgaaggttgtaaccgggcttcgtctgcccgttacgcatggcatcctccttcattctcatgaaagttgcgtccttgtccgtcttggaataggaattcctctcttgcagcgtgtccagatgactgtcgtattcctggagtttgtccctatgttcttccagctccttcagctgtttgcgtctctttttcagctcagtcttttcctccttggtggaaggctcgggaacctgttccagcacatgacgtaattctcccgccatttcggtcagcatggccggagtgaactcaacctcctcattactttccgaatacttttcttgggcgatgacatcgtctatctgccctagcaggacatgtatcttcttcatcaggcgctctcggttccgctcaaccgtttttcgccaaacgaaagtatacttgttggctttggattcaatctttgtcccgtcaatgtattccacgttcaaactgataaatcctttggaagagagaaggagtacggtttgggtaaacacctcgttgatttccttcttcacccgattgcggaaacggttgatggtaatgaaatccggtttctcatatccggcaagccagatataatgaatgtcacgatgaaggagcttttcgattttccggcaggagtagacgttgttcatgtaggcatacagaatgaccttgagcatcatcttgggatggtaagggctgcggccgcattccttatatagcttcctgaaactttcaagattcaggccctcaaccagggcgtcaaccatgcgcaccggatcgttatctgcaatatcctcatctattctttgaggaaaaagcactgtttggttgggattgtaaggacgaaaatgtatctttgccatagtataaattcttatgcctaaagatacaaaatcttcaggttataacaaagccccagcttgtgaaagtcggggctttgggcataaaaaagaaggtgagaattttgacacaccttctttcatttattactttacctttattcagcagccgtttttttcgctgcttttttcttatacttatcaagctctttctgtaacttttcaatctcttcaccctggttcttaatcgttgtaagaagcgaattcaactcttcgttctctatctcaacaggatacaaagcatctacacggctgataaaatcacctaatatattcatataattggtaaacgcatcatacggagaatcataaataccacgattaagccaaattccagttttcttggttgtcataaaacggaagttattgcttgcctgcaaatagtcccagtcctgcttgatgcggcgatcatcacataaatgaacacgaccagccacactatacaatttattaaacgcctcacgctgcatcacattacccagccaacaactcgtatctctttcctcatcggcccatgacatcggataaggaacatcgacttgatctacagacttgaactttgtcacgatttcagacggagtcgagaatgaaatgcccttttctttcgcacaagccggcaaagccttcatgaactgcaggatattcgaagacaacggttgtgcaatacccaaggcagaaagctccataaaaatattgataacctgttcttcttccggtaaccccgcaatccaaccgatatatttatctgcaaataacggatattcgctccaatccgaattagagaaacgcagactaatgtcgtccgacagtttgaaatcacgaagcaaaatcttcaaattaggattataggcacaatggtacacataatgcgggctcttccatcccaacacatgtttggcaccttcggtcaaaatacccttaaatcccatacttgcaacaaccgatccaatctcattcgaataaatcaagctggaattacggaaaaccttgggagtttgtccaaaaacttgtttgatcttcgcactcattctggaaacttcttcacggaaacattcttcattagccaaagaagaaagcccatgagaataaggttcgcacaaaaattcgcaacaacctgtgtcattcaattgatgcaacaggtctatcacagcgggagaatagatctccaactgttccaaagccacacccgaaatagaaaaagcgactttaaaagctcctccgttattctttaccatttcaagcaaagtggtcaatgccggaatataagaacgctctgcaatctccgtgatactgcgttcattttcataatcatcataatagtaatgatccgtaccgatatcgaaacaacgatagcgtttcagatgtatgatttgatgtatttcaaaataaagacagattgttttcatatctaatgttgttttattatttaccgtaattctttaagacattctcataaagagcgcgaatacgcaagccgactttttcccatgtgatgccatcgacctctttctttccttccacctgaagatattcgaacaaagacggattcgtgcagatcgaataaatagcgtcagccattgcatgaatatcccaatagtccgtcttaatcaccttgtcgagaatttccccacaaccggactgtttggaaataatggaaggtgttccgcactgcatggcttccaacggggcaatcccgaacggttcggaaacagaaggcatcacaaagacgtcactgttcttgtaagcttcatatacctgccttccacgttgaaacccgggaaaatggaaacggtcggcaattccacgctcggcggccaaattaatcatagcgtccagcatatcacccgaacctgccataatgaagcggatattacgtgtacgtttcaaaacaagcgctgctgcctcgacaaaatattccggtcctttttgcatggtgatacgtcccaggaaagtcacgaccttttcctttttatgctccggacgaggaatgtccaaaagttcttgcgacaacggataaaccgcattatgcatggcaaaacatttccgcggatcctgatgatactcccggataaccgtctgccgtgtcaattcagatacacacataatacaatccgcataatccataccgttcttttccgttgcgtatacggtcgggttaacctttccgcgtgaacggtcgaaatcggttgcatgaacatgaatgcaaagaggcttaccactcaccatcttagcatgcacgccagccggatatgtcaaccaatcgtgggcatgaataatatcaaattgctgctggcgagcaacgacacccgctataatcgagaaattattgatctcgtcatgcaggttagcaggataccctccggcaaactccatacaccccaaatcatttacattcagatatgagaaatcggcatagatatggtcacggaaagcataatattgctccggcgtcatataattgggaagcctggacttcaaataatcataattgacatcccgccatacgacaggtacttgattcatacctataatattcaggaaaccttcttcttcaccggtaggcttcggcaaacagaaagtcgtttccacatcattctgcagactcagacctttagtaataccataagaggcaaccgcaagaccaccatatattttgggaggaaattcccatccaaacattaacactttcatacaggctcctcctttcaatagttatatttgcttaataagtataatattctcaatatttctgcaacattcattgcgaatgatatagctccacgccccttgaacggaggattaccgtcaaacaattctgaaatggacccgatacaatgagacgacatttcatcttcgtacccaatcagataacgttcgataaaccctataccgctcatcttatagatacgaagatatgcctcaaaatagaaacctgccagccaaggccaggccgttccctgatgataagcataatcacgctggatctgaggaccgacataattaggattatacccaccgctcttcgggctcaaggaacggagtcctttaggagtaagcaactctttcgtcacaatatcgagtacaccttttttctggctggaattcaaaggagaataatcaaatgccacggcaaatatcatattcggacgcacactccactccatcatgttaccatcgacataatcgagcaaatagccatattcattcaagaacacattgacaaacgacttcccgcttttctcggccaaagctcccaatgattcagccaaagcattatttccggcctcacccgacaattctcctgcaaatcgcaaagcgttataccacaatgtattgatctcaacaatatatcctgtacgcggaataacgggatgtccgttaaccgtcgagttcatccatgttacagccctattcgtcccataggtataaagcaatccattatcatgcagaatcagattcggatgtttatcctgacagaggaacctcatgatatcttccaacaatacaccatatttctcgcggcatgcctcacgtgaaaccattttagcatattgctgaatgcaccaaacagtccaaagcaagatatcgggatgctccatttcataaatcttgatctggctcggttcattacggataaaattataaatcgccttacgggccgtttccattaccatttcaaacttggaaacctcatcgatagccaaagtcagccccggcaaagaaataaacaaatcgcgtgccctgcacttgaaccacggataaccagctaaaatataaaattcattttcctgcttatttaagaattgatgtgctgcattgatcaggcaatgtcggaaagtatcgcgaggtgtacgttcttcaacctcgtcttcaaaagtctttttcaacgaacgggttcctatttcagaaaccccaccggaaaagacgatgctttcccctttctttatctcaacttcaaaatatccgggaacatacagatcttcgttaaagtcatagcctctctcctgctctttcggatattcgataccccgataccaatcaggcagataatgaaactcattctttttgttcagttgcatatacaattcaggatagcccggatacatacaggttttgataccattcgacacaacctgatattcgcgactggcctgggcattctcgtgtgtatattcacggacactgcgaaacgctaaaaacggacgcaagcgcaatgttgttgccgaatgggcatccaacaacgtataacggatcaagattcgattctcatgatgcacaaacaacttctcttttttcagaataacacctcctacacgatagatcgtcgtaggaactttctcgcactcgaactcacgaatgtacttatgacctctcggactgtaattatccccctgatacttatgaagccccaagttaaattcggcaccatgctgtatgacagtttcatccaatgacgacaacaatacgtgattctcatcatccagttccggaaccggaatcacaagtaatccgtgatatttccttgtgttgcaatcaacgatagttgtacaatgataggctcccgaacgatttgtacgaagaatttctcttggtagcacttcttccaggttcgtcataagagtcttgtcaaatttaagataactcatatttttatatttggttttaagtttatgctttaacgtgataacaaataaattgcttttgtatcctgaccaaaagtatcacttaaaaaataaaaaaacaaatctgctttcatatttatttagaaatttcattttttacgatttaaaaacagtttgactgataatccattacaaatatctaaagcatatatatgtgttgtcaaacacatgccaagctgttaaaaacttccaaatccggttgtttggcatcgtccggctatcaatgcatttttatttgccgattattccgtacctttgttatagaataaatcaacacaaaagaacatgaaacaaaatagagaaaatccctttttcgagacttatcggactccgttcggaactcctccgttcgaccagatcaaaacagaacagtatgaaccggctttcgacgaaggaatccggcaattggacaaggaagtccgagccattgccgacaatacggaacttcctacaatcgagaacacaatcgtagcactcgaacgcagcggcaagctgctggataaagtcagctcggccttcttcaacgtattgaatgcagaagcagacgacgagatgatggatatctcgcaacgagtatcccccaaactgtcggaaagctccaacaatatttatttgaacgaacaactattcgcacgcgtaaaaagtgtctacgaccagaaagaagaactgcatctcccgacggaagacgcacgtctgctggaggagacattcgaagctttttgcgtacgtggcgccgcactcggacccgaagagaaagaaaaataccgtaaactcagttccgagttaagccttctttccctcacattcgatcagaacgcattgaaagacaagaaccgctacgaactgttgctgacaaaagaagacgaactggaaggactaccggaaagcatacgcgaagctgccgcactcagggctaaagaaaaaggaaaaaccggatggctgttcaatctctcggccccaagctacatgcctttcatgcgttactcagctttgcgtgagttacgggaaaagatgtatcgggaatatatgaacataggtaacaaaggggatgaatacgacaacaaggaaatcatacggaaaatcgtcaatatccgcctggaaatcgcaagactgatgggatatgccaactatgccgactacaaattgaaacatacgatggccaaaactcccgcacgcgtctataaactgctgaatgagttattggatgcctacaagccggtagcccggaacgaatacgaggccgtacaaggatttgcttcggaaacggaaaaagaaaacataacggtcatgccttgggattggagctattattccgaaaaactgaaagacatccgtttcaacgtgaatgatgaaatgacgcgtccctatttcgaactgaatcatgtaaagaaaggcgtgttcggtctggctacgcaattatatggcatcacttttaaagagaataaagagattccggtttatcatcccgaagtagaggcatacgaggtctacgatgccgacgggaagtttctttccatattatatacagactttcatccgcgcgacgggaaacagtcgggtgcctggatgaacagcataaaggaacaataccgggatcaagacggcaaagacagccggccccaaatcattatcgtaatgaacttcacacgtccgaccgagacgaagccttctttgttgacttttgacgaggtcaacacgctgttgcacgaattcgggcatgccctgcacggtatgtttgccgaaggatcatacgcgagcctttccggtacaaatgtctatcgtgactttgtggaacttccttcccaactgatggaaaactggctgacagagaaagagtttctggatcagatcgccatccactacaaaaccggggaaaaaatcccgcaagaattagtacagaaattaatagacgcttccaatttcaacgcaggatatgcctgctgccgtcaactgagcttcggtttcttagatatggcctggcatacccggacagaaccattcgacgaagatgtaatcgctttcgagaaggaagcctggaaacagaccgtgatcgtccccgaagttcccggaaccttgatgagcagcagtttcggacacatcttctccggtggatattcagccggctattacggctataaatgggcagaggtcctggatgccgatgctttctcggtcttcaaagagacgggaatcttcaatcgggaaacagcccgttctttccgtaaaaacatcctgtcgaaaggcggaaccgaagatccggatatcctgtacaaacgtttccggggaaaagaggcggaaatcggcgccctgttgaaaagaaacggaatagaacctgacggaccatccacatccgtccagagccggatgcaagtctgatttgttttcgaggttgccttctatggtattttatgatacacgcttgaacaaaaaaacttcgaacctattccatttatcccaaatatatgtacctttgcctactatttatataatttaaggtatataaaatcagaagacgatgtgcgataagaaggaaaagcaactcgaattggataagcgctatctcagaatggcggccgtatgggctgaaaattcgtattgcaagagacgccaggttggggcactgatagtaaaagaccaaatgattatctctgacggatataacggtacgccatccggtttcgagaatgtttgcgaagacgagaacaatgttaccaaaccttacgttctgcatgcggaagccaatgccattacgaaagtggccgcttcgtccaacagcagtaaaggtgcaacgatctacgtcacctccgccccttgcatcgaatgtgccaagctcatcatccagtctgggatcaagcgagtggtatactctgaaaaatatagggtggaagatggttgcaacctattacgtcgcgctggtgttattatagattatatagaaataaacgactaaagatacgttttatggacaagaacaaaaggctggctgtatggttgcctgtgattatagcattaagtattgctctcgggatatttgtagggaatcattacctcagactgacacaaggaaagaggcatatttattccagtggaaataaaatcaatgccatcctcgacattatcgacgaacagtatgtcgatacagtcgatatgaaacaattagtggaagatgccattcctaaggtcttcagcgaactggacccgcattccgtgtatataccggcaaaggacgcccaacgggcaaatgaagacctggaaggatcgttcagcggcatcggggtttcattcaatatgcagaccgataccattctggttatcaacgtcattccggggggaccttcagagaaggccggcttgaagcccttcgaccgtatcatcacgatcaacgactccctgtatgccggcaacaaaagtgaccaggaagtcatcatgaaaactctgcgtggtgcgaagaacagtacggtcaagttaggcataaaacgtaaaaacgaaccggaactgttgtatttcgacgtgacgcgcggcgatgtccccatcagttcggtcgacgtgtcttacgaggtaagcaaaggaatcggctacatcaaggtaagcaaattcggccgtaccacttataatgaatttatcacagcaatcgccaagctgaaacaggcaggttgtacctcattcgtgatcgaccttcgcggtaacacgggcggttatatggatgccgccatcaatatggtaaacgaattcatgccggaaggccgcctgatcgtatacacggaaggaaaagcattcccgcgcaacgatgtctatacgaacggcacaggtacttgccaggatgctccgattgtagtcttgacagacgagttctcggcttccgccagtgaaatcttctccggagctatccaagacaatgaccgcgggctgattatcggccgccgtactttcggaaaaggcttggtccagtcgccgatccagttaagcgacggttcggaaatccgcctgacgatcgcacgctattacacgccgtctggacgttgtatccagaaaaagtacgaactgggtaaagacagcgaatacgaacaggacatctaccaacgtttcatgcacggtgaatttgattcagccgacagcatcaagctgaacaacagcgaaaaatacgaaaccgtgatgggacgccccgtttacggcggcggcggtatcatgccggatatcttcatcccgcgtgacacaagcggtgtgacttcctatttctccaacgtagtcaattccggtatgttgaacctatatgcactcgaatactcggatcgcaattacgacaagttggcttctttcaagacctatcaggacttacacaaatacctgcaacaacaaccactgctttccgatttcaccaattatgccgcagcaaaagggatcaagaaacgtccgcacctgatcaacatatcaggcaaactgatcgagaaacagatccaggcctacatcgtccgtaacttcttcgacgaagccggcttctatccaatattccagaacgatgacatcacgctgaaacgcgccgtcaaagtcctgaacgaaggcaaatcattcccgacactggagaacaaaaacaatacgcccaatggaattgcgcaaagccaaacaaacgcttcgagaggatatggcttccttaaagagatcatatacgaagactacattgctggatctctctgctaagataatggatcggctggaagagacagacctcttccagcaagcttcgtgtattgcactataccatgccatccccggcgaagtgcagactgccggactgatcgaaaaatggtaccggaaaaagagattattgctccctcttataaaagggaatgatcttcaattgctcttgtatgcaggaaaagaatcactcaaaacgggtgttttcgggatattggaaccaagcgaagattgtgaagccgtaccggaaagcgaaatagacctgatcattgttccgggtgtcgctttcgaccgccagcataaccgcctcggacggggaaaaggattttatgaccgactgctttcgacactggatgttcctaaaatcggaatctgctatgacttccagttaaagaatcagattccggccgagccgttcgaccggaaaatggacttgatcataactgaaaaagaaatattgtgattcagatcttatccgtttgcaacagctccataaccttagcatccgccttggctcttatctccggtgtgatgctatccttcacgattttcaggacaagtcccatcacggctacatcgtcagtaaagccgatcaccggaagaagaccttccggtatcaggtcgaacggcagaataaaatagcctaaagctcctatgatataagccttatgttgtaacggaacatctttatcgtgcagcagataataaagctggaagacagggcgtatcaccgtcgcaccgactttctttgcaacccgttgtactttttgccagaatttattttcagaatagtatgtgccatacttttccacttcataaacctcttcaaacggaacttcttctatcttttttgcatccataatgattcaactcttttatctgataactatatcttgtataacttccgaaccggcataatcgttcaagctcttcaccagacgttcccggcacaacaccaattcacttctcaagacggaagaagtgagggaaacatacagcactttgtcttttacatatatattacgagtgtactgagcgaccatcggccccagtatctcgccccaggcccgcatgacacggatttccagtatcttccccctcaactcagcattatcctcgaaaaactcccggatcgcatcgcccaacgtctgtgcattccggtgcatcattccgcttcctccatcggttgcacttcaccctgttcgaccctgaacagagcgtagccgtgattgatcgattgcaggatggcgtccaaatatttccggttcgtatcagtaatgaaaatctgcccgaactggtcgccgctcaccagcttgacgatctgctccacccggtcggcatccagcttgtcgaaaatatcgtccaacagaaggatcggacgcgcttgccccctgcaggaaagaaacacatactgagccagcttgagggcaatcagatacgtcttgttctgcccttgcgaaccgacacggcggatcaggtggccgttcaacgtcatctccagttcatccttgtgaatgccggtcgaggtataaccgagtatgcggtcacgttcccgattggcagccagcatatccgccaggctccccttctccaactgggagatataccgcaaaccgacctgttcggtcgaacggcagatcgtctggtaatattcgttgaagatcgggataaaatcattcaccaacatctgccgcttctcgtacaccatccggccgtacatgtccagctgcatttccagcacttcataaagggaagcgtcgatacactggtccttcaacagcgaattccgctgaagcaaggctttattatattgtatcaacgcatgcagataaggcttgtcctgctgcgaaataatcacatcgagaaagcggcgacgttcttcgctcccgccttgtatcagttccgaatcggctggcgaaaccatcactaatggcaacagaccgatatgctccgacagtttgtcgtactcttttttattccgcttgaactgtttccgctgccggcgacggatagcacaaaagatctcctcttcacgcccctcatagtcatagttaccttgcaacacgcacatatcctgaccattgttgatcagctgggaatcgggcgtattgatatggcttttacaaaaagagagataatgaacggcatccaacagattggtctttcccattccgttattcccgaaaaaacaatttatttcgggagagaaagaaacttctgcctggagaatgtttttataattgagtatagaaagctttttaagtatcatccacgctatattagttgcacaaaattaaaaaatatacttctaagtatagattttctcagtaaaaaaaactacttttgcgacttgaattgccacaggcataaaacaatgataaaataataacaactataaaacattatggctactaaggaaaaagacaccaacaaagagttagaggtcgaagaaattgtttcgagatcggagcagttcattgaaaacaattcaaagaaaatcatttatggtattatagcactcgctctcgttgttggagctgttttgggtatcaagcacggatatttgattccgcaggagaaaaaagccgcagcagctatgttcaaaggcgaacaatattttgcaaaagactctttcaacctggcactgaacggaaacggtgcggattatgaaggattcgaagctatcatcgaccaatacggaagcacatcggccggtaacttggcaaaggcttatgccggtatctgctatttcaagatgggcgacaatgaaaaagcattggatctgctgaaatctttcagtggcagcgacgacatgatctcgccggctatcacgggcctgatcggtgactgctatgtaaatatgggcaacgtaaaagaaggtatcagctatttcgaaaaagcagccaagcaggcaagcaacgaagtgatcagcccgacttacctgaagaaagccggtatcgcttatgaaagcctgaaacaatatggtgatgctgttaaggcatacacgacgattaaggaaaaatacttcaattcaatggaagcttccgatatcgacaaatatatcacccgtgcttcggcattgaacaaataacgtatacacattattataatcatataagaggatgtctcgtcaaacaaggcatcctcttcttttaagaacaaaaaatatggcaacagcttatcagaatttatcggagtacgactttaacagtgttcctgacggatcggaagtgactgtcggaatcgtcgtagcggaatggaacaagcacatcaccgaaaagctattggaaggcgcctgcaacacattggaaaaacatggcgtcaaagccgaaaacatatttgtaaaacgagtaccaggcagtttcgaactgacttttggcgcaaaaaaaatggctgaaacaaaagaagtggatgccgttatcgttttgggctgcgtcgtaagaggcgatactcctcatttcgattatgtctgttcaggcgttacgcagggcattacagaattaaatcttatgtacgatattccgttcattttcggcttgttaacgacagacactatgcaacagtccgaagaccgtgcaggtggcaagtacggaaacaaaggagatgaagcggcagtaacagctcttaaaatggtaaatttttctgcctaaacgcttgcaggtttcaaaaataatcgtacctttgcactgcaattgaaaataacgggggcagttaccagagtggccaaatggggctgactgtaactcagctggctttcgccttcggtggttcgaatccatcactgcccacaaattaattgcggaagtagctcagttgatagagcattagccttccaagctgagggtcgcgggtttgagccccgtcttccgctctcaagaagaggaaaatcgaaaggttttcctctttttttatttggcagtctgcatttatttacatttctttggaaagatccatccatcatctattggggcaatatccgaaaaagaaaagaaactatctgccgtagacggagacactgaagatgccatatatgtatatgacttgcccaccccttgattggtttcatctttcattttctaaagatattgaagtaaaaacactcctttcttcaatgaatatcactacttttgtcattgtgtttactaactacaaaaacaaggatatatgaaaaagatgaaatggctgtatgtactactggccacattcctgctgacaagttgcggaacgctcatgcaaccctatcaaatggatagtaagatgaaagacatcgaattaggcatgaccaaaaagaaagtgatctccatattgggaaaagatttcgaatcggcaggtgcccgcatgacctccgaaggttcgatcgaaaccatcagctacaagacggcttccatgactgaaaatacggaagggtattacctgttaagtttcaaagacggaaaattggttgagtggtttaaggaaaaatatccggtacacaaccaccagcactaattgtcgcaaacgacaatgtacaaataaggcagatgcccggaggcatctgccttatctcttttacggttataaacctttttcgatacatgtacccggttgaaactgaccggatgaccgtgattctcaatctccgcttccctacttccttttcggttcgctttgatgtaatccataaatgaatcttttttctttgttttcatacgaataatatttaacgtgacaaagatacggataatatctgaagttggttcagtctttcctgaaatgtacggaaatacataaaaagccccgacactatcgcctgttctcatggagcaactgatccgtaacataccgtaaactatctcaaaagtcatagtaaactaattcaagacatacttcatattattcatatgtagtactaccaatagacgatacgtagtaccacatatcgtctattggtagtactacgtatcgtctataaatagtaactaccaacagatactttacgatatgttatcatttagtttctggggtgttttgacttagttgatggcatgaaacggcttagtctaccggttacctgaggattggttttaggcggtgtcggtaagatatcgtaaccagttcttctgcttgaaaagcctgattaaggcttttgctccggataagtacgtttaggattctttggaaaccagcctttcaagacgcgctcttcctgctcgaaaacttcctttatcgtccagaaagaggaaaaggcaaagacgccgcagatagccgagacgaaaacgctttcaaccagcagggaagcgacagttcccgctattcccaaaacaagaaagatccaccagcatttcgtgccccaataatattccgctttcaccacaaccggatgaaaaagcccaataatcaaaaaggtagcaatacctatcaacaatccatcaaagttaatcatgtccatatttgtttacgatttaagacaggcctatctgcctgtaacgacaaagatacgaagaaatatgtatcgttcatgataaattatttctatccacttatcgataattctatcaaacaaaacaaaaaaagaggcatccttgttgcaggaaacctcttcattatatcgaaaatccgttttctattagttagccggagcttcttcttcagaagaagaaacgggagctgtcgcaggttgctgggcagtgccaaagtcaggagcaaccgtattcggatcgattgttacggcattatttatctgttctttgatttcagactgattcgcgtgctgagctctcggaataaaagcagtaatcacaatacttaaaacaacaacagtgccggcaagagtccaggttgctttttcaagaaagtctgtggttttgcgtacccccataatttggttggaagaagagaatcctgaagccagacctccacctttcgagttctgaatcaatacaatcaagatcaatagtatagatgcgatcaggattaagatagaaataaatacgtacatctttgttttattttttagtgttaataatcaacttttccagaaatctaatttggtctgcaaagtaaacatttttttctggatatttcaagtttaagtttttaattatttgcaatgccttctcatatcgcttctgttttacataaatatgagctaatgtttccgtaaaataggagtcatccagcggtttatgctggttttcctccaactccgccagatttccgggaacaggtgctccggttgtctccatatccaggttcagaccactgccgggagtccgctgttcttcattttttataaaagaatcgatcagatcgtgatgctgcaaacggacttcttcttcctcttctttttcctccacctgcccgttttccttcgtcaatgaccaatagatgtaatccgacgaaacggacggctggaacagaagagacgcatccgtcttcggttcttcctcctcacgattggacaggaaagcatcgatcagtgaaaaaacatcttcacgggttggattttcctctttcgctgactggagctgcaaaccgaaccgttcaccttctatcagggtgaacaacttcctacggtcagggacatagattgccatcttcttcaattctgcgccaaaacgtatatcgttcaagaccgccaggttcttcaggtaaagcatccgggcaatctggaaatatgggaattcatcgacgatctgctttaactgctgaagtgtatcctcagtcagcagggccgggctctccattagtcgatatagatcagcagctttcatttttaccagttggcaaccgttgcattataaatttgatcgacaagctcgtcaataatctcttccgataactggtcctgtacctgttgcaacatctgagtcgcatcgaattcacggtatgccgaaaagctctgctcaaaatcctcatccggatttacccggttagcataacgaacccgaaccgtaatcgtcaacttggtctgtgaggcataagcatcttcttttacagccataggagtcaggtcatagcccgtaatttcaccctccaggtccaagtcgccgttgctccccaccaactgcagacgggtctgacggatataaatatccttcaatgcttccgtaaacttttgcgaaaggggcggatagactaacggagcctggttcgggaaatccttgatcgtgatcgtcttgaccttcgtataatcaatagaagctccattaaacttataggagatcgaacaagccgtcacaatcagcccgatcaggcagaaaagccatatcttattaatcttcaacatcttttattccagattatattcttttatttttctgtaaagtgtccgttccgatatcttcaggtcggcagcggcattcttacggcgaccgttatgtttctccaaggcctttcggatcatctctttctcgacttcttccagcgacaggctctcctcctcttccactgcttcggcttcctgaatagaaggaaccggatggacggtatggatcggatggggataagccgccggctcttccggcatctcgattggcatcttgcctcccataatgtcgtgtaccagcttcttaagttcgttgacatctttcttcatgtcaaacagcacttgatatagaatctcccgttcgctattgaatatcttctgatcggaatcctgtttgactaggaccggatatttctcgatattcagatcgggtagatacaagcgaagcactgaagcggtgatatcccggttttcctcgataacagaaatacgctccgttatgtttttcagttcccggacattccccggccaacggtaggaaagcatcaactggcgggcttcctcatccaaacggatcggcggcatccggtacttctccgcgcaatcgctggcaaatttccggaaaagcaagatgatatcctcaccgcgctcacgtaaaggaggaacctggataggcaccgtgctcagacggtaaaacaaatcttcacggaattttccttccgctacagcttgcgtcagattgacgtttgtcgccgcgacgatacggacattcgtcttttggactttggatgaaccgacacggataaactctcccgtctccaaaacacgcaacaaacgtgcctgcgtaggggtgggcagctctcctacttcatccaggaagatcgtcccgccatccgcaacctcgaaatagcctttacggtcagacaacgctcctgtaaaagaacctttttcatgtccgaacaattccgagtcaatcgtaccttcaggaatggcaccacagttcaccgctatgtattgcccatgtttacgcgggctgttctgatgtataatctgaggaaaagtttctttaccgacaccactttcaccggtaatcagcacagacaaatctgtcggagcgacctgtagggcaacatcgatagcccggttcagcccggcattattaccgataattccaaaacgctgttttatctgctgcacgtcaacctttatcatatttcttctactatctgtaattatttcagttttatctgccaaaattacaaatcttaatccaattaaccgaaatccgaaggcggtttctatacaggtttgttattttttagcagcgtacgtacgttgatataaaaactcggccaggtctttgtcgtcggcaatattttggatttcttctggagaaacaggctcaccgatataaacatcgaccgtacgcccgcgcttgttaaaggcctcggctggtatgcgcaacgtacggatacgccagtcaatccggcccagccaatagaaaaagcgggaattcaggaaatcgaaataaacaggatatacaggcactttcgctttccggatcagacgaatcacactgtgcgtccaaggcaaatcctgtattttcttcgtcttcttattatacatcgagatccccccggcagggaaaaaacccatcggatgcccctctttcagttgttgcagggatatacggaccccgtttatattcttcagattagccccctgattattggagtctggcttgacggacacgaaattatctcccatggccccgattttggtcaatacgccgtttaccattactttgaaatccggacggcgtgaagcgaatatatcgatcaacataatcccgtctatcgatccgataggatggttcgaaactgtagcgaaagcgccttcgggcagatgatccagcacctcggcgttatgtagatcatatttaatatcgatcaacgggtcgttcagcaaggctgttgtgaactccgctccccgcaaatggcagttatgggcatgagccttgtttaccttatcgatactcaaccatttgatcagcactttccccagaaaagagccgaaacgacttttaaagaacggggcagcttcctgtaaatcatgtatgtctacaacgctctctttcataaattcttatttatagaatgttgcacacatctgttcatgctttctcatggcgagcaacaaaacgatgttcaatacgattatctcatacaagaaataaacccaaacctcaccgaccagaaccacgacgaacatcacgatcgtacgtccgttaaaagtcaaaaggtctaccatgtgcatcagttccttgctttgtttgcggaaacggatacggataccttccggaatatcatctccataccgtgcatgcaagctgcgaagcataccctgcaaggacggagtagctttcacctgcaaaagcgtatagccacgatagaggaaatagaaaaatttattgataccatatttcatttccttatggcgggcacgtacctgttccagcgactggaactccgcacctttatccttgctgatgaaatacaaatgaagtgtcttgtaatagtccgtgatattcgcctgtaccaaatgtgacaaaccggaaagaaccgccaaggcaaagaaccagtccgttccgtaatcatgagacagacgaagggcgaaaccgacataaatacacgtaaaccagatatccccggcaaaaccatccaagatacgaccgatcgccgatttgattcccgtcaggcgggccaactgcccgtccacgcagtctaggatatttgcacataccagcaacaggataccgcaaacattgtaaatcagatcatcatgataaaaaaagaaaccgactgccgcccctacaaaaatagagacaacagtcaccatattaggcgtaatacctgtcccccttaacatacgggcaatacgaaaaccgataggacgataaaaaatccggtcaatcttattttctgtttctatcgacttcaacgaagcctcgtactctttatccaagtcgctcatttatcttctatttatacgaataaccgccatcgacgacgatcacttcgccattaaaataactattttctactaacattctataaacttccgccagttcctccggatcacagaaacgccctaatgaaaccttgttctctatattacgacgtatttcagcgggtttcgttttctgccattcggtatccacaaaaccgggagccacagcattcacacgcaactcatacggaaccaggaacttcaccatattcttcaccaacgcatgcacggcactcttcgtcacgccatacaccagtgaaaccgaatggggctgtatccccatcagagaaccggtaaagacaatgcttcctcccttattaatcaaaccgacaatgcgttgcaacaggaagacagggaaatgcacattggcaaaaaacacccgttcccattctactatatccaaatcctcaaacgagtcacgacaggtcaggccggcattaaagatcaccgcatccaagcgcatagagcacccggttagaaatgattctatcttttcgattgatttccgatcggaaatatcggcctgaagcgtaagaacctccactttgtattgctgcagcaaaccgtctgccacccgaagagcctcttctttatccgaagcataagtcaaaatcaggctgtagccagcttttgccaaacattcggcaaccgctctgcctatccccttcgtccctccggtaatcaatacccttttttccatcatcacccttattctttttcaccgaagcctttaacagattcaggtttggattgccgttgagacttcaaattcgcttcatatgaatcatggatcgttttcttcaagttggaagaggacactcctgtcccgtaagggaaatagaatacctgaacgcccaagtctttcaaataatcatacttgccataccaatcgtctcccacgacaaaagcgtcgatattcagctttttgactatttcggaatgatccaacgtatgttgtggaatgacaatatcgggagttttcaatgcttcgatgatttgcagacgttccgtaaaaggaatgatcggcttcgccttataagaagacaccaattcatccgtactcacccccacaatcaaaatatccgcaaggctgcgggcataatttatcatccgaagatggttgtaatggaacatatcgaatgttcctgatgtatacacaatcgttttatccttaaacataatacttaatatccttttgaaaccgcaaacttacacaaacttttcctatcaaaaaaaaaatggcggtaaaaaggactctcgtcctgattcagtttgggcattctctctctccgcttcatatccacaactatatacttaagtaaaatacaaaaatgacacaacttcaactaacgaacgactaaacaggctcttacaacaaaaatacctctctcttacttttcgactacggacaaaaaaacaaaaaccatttcctgctttatccataaagcaagaaatggttttttagtattcaaatgacttccgggcttctggttattcgtcttcctcttttgtcaggtcgagcttttcattgtcacctcctttatcgaaatactgcttgcgcagagggttggctgttgcctcacgataacggatacgattccggtaaatatccaatgcagcatatagggcctggcggaaagattcttcagaggccacattctggccggcaatatcataagccgtaccatgagccggtgaagtccgtacgattgatagacctgccgtataattaacaccgtcatccatcgccagcgttttaaacggagccaagccctgatcatgatacatagccagtacaccatcgaatttatcgtacacttgcgaaccaaagaaaccgtcagcagcatacggtccgaaagacattactcccttcttctctgcttcctggatagcaggaataatgatttcttcttcctccttacctaacaatccggcatctccagcgtgcggattcaaagcaaggacagctatacggggacgcacgattccgaaatcttgcctaagtgactgattaaaaatacgcaatttggacacaatatcttcaacggtaatctttgatgcgacctgtgctaatgggatatgtcccgttaccaaggcaacacgaagattatctttcatcagaatcatcaatgccttttttcccaaaccaccgaaacattgttccagatattctgtgtgaccgggaaaatgaaattgttcattctgtatgttgtgcttattgatcggagccgttaccaatacatccaccgcaccgcgtttcaagtcggtaacggcagcctccaaagccagataagcggcttcaccggcagcagttgtagattgacacaactctactttagtctcgtcatccacacagttgataatattcacccggtttgccccggcatcttcagcctgtgcaatgatgcttaaattcacagcaggcaattccaagaccttccggtgataagcggcaatcttcgacgagccgtaaatgaccggcgtgcaaagttcggctatacgagtatccgacaatgttttcagtatcacctcgtaaccgataccatttatatctccgtgggttatgcccaccttaaccaatcgttcttccatatattttgatttatgatttatgatttatgatttatgatttattccatcgctgctctaaatcataaatcacaaaccacaaatctcttgttacttttcttcgggaacatccagtttctctacctgtgtttcttcaaattcaccaggcagacgcaaggtatacaatgctgattcgacacggcggataaaattgcgcttatccgtctccggggcgaatacaaagccttcaacgactacaacccggttgttcttttcgtccaaacgtgcatgactaacaaatggtcctcccatcatatcgcctttcatatgccataaaccgcgcaacacaccacaatatttaccatttaccgttgtcggattataagttacccaagctgtatccgtagccatataagatccgggaaacgtccccggcatattcagcttcatgacagagtcacgttttgcaatcagatagtcggctgtgaaagtatcagcatccttatatgggaaatcatagacaacaatatccgtacgcccagtattggcattattggaagcccagaaaaagccggtcgtgtcacggaaataggtcatatttgccggagcactcaacatgacgttaaaacggtccttcacgtgatccataaccaccggactatgttccttctccaattgtccgatcgtacggtttctttcgcacttggtaaaaaattccactatgttccgcggatgagcctttacgtattcaagaatggctgcatcgtcaggagctgtcaatgtcatcactacctgacctttcgcccagcgattattctcatagttcagtgaaactttcgtatactgagacttatctatcctaacaatcaaaacattgcgcacatatgttaacaaaccgttaaactggtcaggagtcacataggtgatcttaaaggcaggttcagcctgtggcaatcctggaatatcggaagtcaattcggctttgatagcctttccggcaggagcatcccagtcagctttatccatcgtcacaacaatttcataggcgaaaccggtagcatttctcatcactgggcccgaactacatgctcccataatgacaagaagcattaaaaagctgatcaataaagaatgtgttttcatacccgtttatttttttgttatacaaatatagcttcttttccctcaaaagaaaccatttctattctttttgttggttcttcgccgtagaaagcatcccgcatgcggcaaatatatcttctcctcgtgatgctcggatcgtacaaacgataccggctgcattcaacgtgtcccggaacgcctccattcttgccaagtccgaactttccaacgacacattagggattgcatgaaaacggatcagattgactctgcaggggactttatctaataaacaaaccaaagccttcgcatgttgaagatcatcattcaaatttttaaaaacaatgtattcgaatgaaacacgacgttgatgcgtaaaatcatattgcttgatcgtctcgataatatcacacgcaggaaaagccttttcaaccggcatcaaagatcgccgttcgtccggataaggcgaatgcaagctgacagccaaatggcagtcgctctcttcaagaaaccgttttaaccctttggctacccctatagttgaaaccgtgattcgcttcggactccaggcgtatccgtaagaggcggtcaagatttccaatactttgaacagttcatccacattgtctagaggttcgcccattcccataaaaacgatattagtcaattcttccgtttccggcaaggattgtatctggttcagaatctcattagctgacaaattcttggtaaacccctgtttaccggtcatacagaaaaggcaattcattttacatccgacctgggaggaaacacacaatgtcgccctgtcttccgtcgggatgtacacggattcaacaaaattaccaggaccggcaggatacaaatacttgatcgtcccgtccaccgacttcatcaagtcggaaggaggtacggcccccacctcaaagtttttctccaacaaggcacgtttcgccgaggctatattcgtcatcgctgcaatagaagtcactttttttttatacagccagtcagccatctgcttagctgcatagcctggaagtccggcttcaaaagccactcctttcagttcatccaaagtcattcccaataaacgtcttttctcattcatgatccttcttgtgtttctttcatgcaaagatataaaaaaaccgccaatcggttgcgattggcggttccctataatggacggcagtctctcctgccgcaaacagttcaacgatcaataaaagcggatacggttatcttccacatcagctttgttaaccaatgactgaatagcctggaaaccaaaacggtaaacgttagaagcatccaatgctttgatttcagcagcttcgtcataattcttggcgtccttgttctgttcgtataccttgaacacatatacaccgttgttgccgacaaccggagcgctcaactgatctttctgagccaaggaaaccattgcattcaacttcggctcaaccccgatacctgcgatacggcgtgttgcaaagctaacgaacttaacagaatctgcagaagaattcatagcctgagcataagcatcgacagaactcagatttttagcagacaggtcttgtgcgatcttttcacccttcttctgagcgatcaactctgatttcaacatcggagtaacagattccaaagaacgataaccttccggcaacgtaccctgaatagctgcgatcacaaacttatcgtcacattcaaaaatttcagaaatatcgcctttgttgttctggaacgcccaacggattaccggacgggaattcttgatagaacccagcaactggtcgttagcagttactgtcacatttgacaacaagttgtaaccggcctctttagcggcatcatccaatttatctatattctggttctttgaaatgaactggttcaattcattatagatgttaccataagtctttgtactcggagatacggtcatatcaatatctgctactttgtatttgtctacatttgtagtcttatcggtaactttgatgatatgtgtaccatacaaagattttacaattgaatagtcattgaccggagtcgagaaaacagcttttttgaaatcatcatttacacctctcaaagctgtcgcttcagtaaaccagcccagttcaccccctttttcagcagcctggtcagctgaatattcctttgccaaggcaacaaagtcaccacctttcttcagtacattcaacaaactatcggcttttgctttgatagcagcttcatcgcctgtatttgccaacataatatgactgaccttcacagagtcaggagcaacggttttatcgaccaacttaaacaatctgtatttatcgttttcaaaaacagggccgtatacgtcaccaacatttgcagtctttacaaattgcttcatttcaggatccaatgcattctctgtaaagaaagcgtccatataaggtatttcagaattttccgtcaccaaatcagccactttttcagaagtagccaactcgctcttcaaagattcgatttcagcacttgctttgtcgtagtcttctttgctcggacggatatcgacagcgatatatttgattacttttccttctttctgcttgaacaactccttacgctgattgtacagcttttcgatatcactcttgcttacctgtatagttgaatcaggaatagaagcataagattgcattgcataaacgatatcagagcttacagccgagccatcgaaagcatcttttgcatccagtttgttggcagaaacagccttactcaacagagttgtatacttctgttccaaacgctgacgtttgatattcttttcccagaacatccagaactgacgcccctgcaacaactgtgcctgctggtcagcgggatagttggcaatattatcgtcgtcgatagtctttaagaaatttaataatgcagttttgtcaaatgcacctgtctgcggattcacaaacatctgcatctgttggatcatcggagaaatgttttcaccctgaaccatatcgaacagttcttccggacctactcccattcctaactcggaagttgcttcattcaaaacgatatcctgaaccataccatcgaatacagactgacggatttgagtctggtattcttcgggcagactggtggaacctgtctgcattttgtacatttcagtcatttcgtctacacgatcctgaaattcttgaattttaataacttctccgtctacctccgcaaccgtctcctgcgattgtctgaaataagtagaaccggagtttaaaaagtcaccgatgataaaagcgaacaatgccacccccacaacgagtaccagcagtcctgctttgcttctgattttttccagcgtagccatttatctttatctattttaaagtttattattccacattttaagggcacgaagatacgaaaaaaagagattgccgcatctttttatgctttttttttaattaactcactactttcatacgaactaattcgattttcgtagctgtcacttttacgattttaaaagaatatttatcaattacaatcgtttcattcaacttcggaaatttctgataaaaatgcaatataaaaccggctattgtcacataatcgtccgactccggtaattccaagtcaaacttctcattcagcgtatcgatctctatacgaccggacaatagatactcgtcatctcccaccttcttggcaacatacgacttgatatcgtgctcatcttctatctctccgaatatttcttccaccaaatcttccaaggttacgattcccgaagttccaccaaactcatccaccacaacagccatacttttcttgtcctgcatcaagactttcatcaatttattggcagccatcgtttccggaacaatcgagacgcttcggatactttgtgtccaatcttccgggtttttaaacatttccgaagaatggatatatccgacaatatcatctatattttcattataaacaagaatcttagaaagtccagtctctacaaaacgggaacgtagttcctcaagagcagccgtcttatcgcaagccacaatttccgtacggggaacgatgcaatcacgcaaacgcacattcgaaaaatcaagtgcattctgaaaaatctttacctccgtatccatatccgaattttgaggcgcatcttcaatgctctgctggataaaataatcaaggtcgactttgcccagcgcccgttgcgtcgaaccggtcacattctttacaccagcaattttcagaatcaggaaagaaagcaaagaagaaaatttagaaaccggatacaaaacaacatatatgattaacaaaggtaccgaaaacaacgtaagcgaaaagttcggattcaatttaaaaacagtttttggaataaattctccggtaaacaatatcaggatagtcgagataatagactgagtcaaaacaatcagtgcctcgttatttaccacacgagcaataagaggttccagtataatcgccatctgcaaaccgtagaccaccaacgctatattgtttccgaccagcattgtagatataaactgatgcgggttccggtaaaatatatccagaatcttactcgtcaagcttttttcctttttatcaagttcgaaacgtaacttattggaagagataaaggctatctccattcctgaaaagaatgcagaaaaagccaatgatattaatatgtatgtaagtgcacccattacttcgttttatccatctcggccggcaccaattttcgtggaaccactttttccttctgtgccggttgcttctgcggaacagtctccatagcagggttggcagctatgggcatagaatctaccggaacaatattttgggttgaatcagtcgttaccgattcactgacagggaatactccttgagaattaaatattttatattgagtcatattctgattcgactcgaatccgatacccgttatgattttatcatcctcttgtatccgaatgtatttatcagaataaaccttttcccctttctggtcccaaaaaagcaaggaagtttcaaattttttcccttccagattctcaaccctcacattgcctatcagcttccatagtcctttcttctcataattataagccgtatccgctttaagactcgcttcaatattaaataaagtatcgaatttttccacataaataccttcaggaaaatatgagaacggctcttttgccttatcgaatttcaaaaattctttagcgatagcacgatagcgtgtaatccccgaatcggagaactgagtagtataatcagtagtcctcaacgtataagttgtttcaggatcgaaagcaaccacaacaacctccttgttatcgccattacaagaggcagtaaataaaagaagcataacaactaccgcaaagatagttgttatgccttgttcgttcgttttacaaagaaaacggttcttaatcataattatctgattgtgacagtctcaccaatccatcccccgattttgaaagcttttcctttttccagatccggatgcatgaaaacttcttccgtagaaggaaggtgagcacgataagtattagccaatttaccagcgtcttctgccacattctgatctacctgtcttgccttttcaaatttatcgatagctgcatagtaaacagctttggccaaaacggcatcattcggatagatagattttgcagatttagcatacatattgccaatcagtatatacggcgcaccgtaatcaggattggtttcaattgctttctgacaatattgtcttgcttttgacatattgttctgttcgaacaacagtacaccgatcagataatagtcttcagcctttgaaactgcatctgtttccatattggctgcttcttcaaaatactggatagccttatcataatctttagcttttacagcctgttttgcaatacctagagcggcatctgcactcggttccagtttataggcataacctgcagctgtataaaaagcatcgatttcctgacaacgaacacgtctcaacagagatacgatttctttcaacgcaggcaaatcatcctttgcagcttcaactttggaagcatacatattctgcaacgtttcacaatcggcagcaccacttcctgcaaaaccaccatcaatggcagacttgtaggtagtcaggttctttatctccttttcattatttgctgcttgagctgcggctaactgagttgcaatgatctttgaacatttcaaatagtcctccaaataagtctctttgaaattaggatcagccaacagttgacgatgagaccccatcatatacaaggatactcccattgcttcagagttttcaccaaactcattgatcacttcacccaaccaagcataatacactttcgggtctgcattatctcccttaaggcggatataatcagcagccttacgagcaataatccaatcctttccatactttcggtcattaccgaaatatttcacacgcgtatcatacaccttcatcaaatcatcgataagagcagctttcttagccggatctttctcggtattgattttccagtccatgatcctcacaccatacaagtagatatccttatgagctcccggacattcggtataagcctgataccagaattcataagcatccttgaaattccctgctttggcataagggacaaataagctgatattggtaatacaacgtacgctatcttcaccagaaccgaacggagtaccagtatccacacctttttgtgcataagctccgaacgacatcatagagcatccgaaagccaataataatactttgatcttcatatttatttctattaaagttagctatttagttaatcaaccttaaatttcataaaccatgcttcattgaacgtataattcactgtaaaacgaaaatactgttcatcaatcatgttcatcttcacttccggtttctttttcacatactcaaacgatatgttaatcaacgaacggttatcaattaacggcaatcccagaccaaggcttgctccgatctcgttataaccgtctccggaaggattggcatctgtccggttcatacgcaaataagaattgccataatggacacctgcgcgataacgaatcctgctgaaatatgatttgcgcatataatccggtatatattcgccaccaaccgctacccgataacgattcttgaaattatctttctccccaaagtaaggcatttttccccaatcctcataggaaaaatcggctgctaacgttaatttattttgtttcacataagaaagccccactccatacgaattaggcaacgcaaacgctttcccgctgatagtatcagactgaagcacttctccatctgaaccagaagatgtataagactgagtcaattgataggattttgcatgcaaactttttttaggagaaaaaacaagacctaacgtcacactctccgtcttgcttaacggatgtgtgtactgcaatccgaaatccattttcaggtcacgcaccctcaattcctggttacggttcgtattatatgctcctgttccttcaccactcatgattacaacttgttcatgcttgatattcccaaacaggaaaccgaaattggctcccacggctaaacgttttttccagatatcaatagagacacctccatagaaatcactcaaaccgcctgagccgttataagtttccgtaaatgtaactccttcgtcgttacgcaaagcaccaaacttataaccgacataagaataaggcaacaaaccgaaactcaaggctatccggcgatgaatcggaaactgcattgcaatatattccacgtttccgttgatatcgttctgacgggcatttccgtcatcaaaccacgacaactgaccggctacaccaaaatcaaagagaaatgtcagggagtccatgcaactgtatgatgccgggttcatcggatttatttgtttcggcgaacgtaatccgtaaccaacaccgcccatggctcgacctgcgccgaacgaacgttctcccaaatcaccatacccgaaacgggtatagggcgagtttgtattgttttgcgccatcaaaggcaacagcatgaatataagaacgcttgttattagtactttattaatcttcaacattatactctaagattctgtttaatcctgtcaacactaaattaatgtctgcaaagatggagttttttagtcgtctttcaaaataaaacgaatgaccgcctgttaaaaaaaccaaaaggttaggatattttagccgaagcatttcgatatacccatccatctcgcacactataccatttactactccagcctggatggctgtttccgtatccgttccgaccaaaggaatgtattcctgctcgacaaccaaaggcaatttctccgtaaacaagttcaatgctctgaaccgggttgtcattccaggtgaaatattccctcctaaataagaaccggaagcatcgatcagttcatatgtaatagctgttccggcatcaatcaccagcaaatcctttcctggttgcaggtaattagccccgacagcggcagccagccggtctttacccaacgttttaggcgttttatattgcaccttgatcggaagagataccgtttcgtccaaaaacacaaaattccgaagattgcttcccaggtattcaaccaattcgtcatctttatctatcactgtcgagaatatccctttcgtcagcgggtacttcttaaagatagaagagacaacctccacgtcgaatttcttaaacacaaaagaagcctccatatgcctcttattgtatacagccactttcgatgatgtgtttccttgttctataatgagattcacgtgtctgaatttttccgcaaagaaaaacaaaaatgatgagataacagacatatcgaaggcacaaagtataaaaaacaggaaaggaatgactacctctcctgttccatcacataatataaagttcaattaatcagccagaatcaccaattcagcacccgatgcaaaatcctgtccgcgctgctcgctcaatgctgtaaaacggatatagcgggctttgaccggctgatcgaacagcactttcttttccttcaggttattttcaaaagtacctttcaagaccggttcaccccagtttttaccatccaggctgacactaatcgaataatccttgatattaccattcgatccgtcctgccggggaaggaatgaaaaacctttaatctgttttacttcccctgcatccaagtccacccaatgcggatatttggcaacggtaacggaaaacatcgtatgccagatcgtattcggatcaccatccgtcaggttcttggcatctccgtaaccggactcttcgctgcttgtatagaccacttccgtctgaatactctcgatcttgctgaaagaagccgttgcattgattttcggattatctttaaaccaggcttttacggtaccaccattgcggaatggtatggcttccgaatattccttcgcttttcctttcccgtcggtcgtatagcaaatcacagcgtctttacgagccgatgagagctcaacggatccggcgcgattacgcatgattgtcaacggcatttctccggcgggtgcaacatttgccgtaacggttacatcttttccggcaggacggattataaagcccatgtcatgatgtccggcaaagacgcgatcctgttccaacggtccgccttgtccgcaactgttaccacccaacccggtcacagccgcatccaaatgcagatacgtatcccctgcaaccggcaactggtagggatgagaagccagaatcaaatccaacgcagaatattgaagagccgatacagacaaacggtcggtagccacaaacacagcaccctcgccatccggatcggtcagggcacaccagcgtacatcctcgtggttgcccatatcttgcggtttcgggaaattcacaaactcgccagccaccgtattcctatgctgttcgataaactgtccgctcttgcggtcagcatagttatcgatcgggccacgtccgtaataagtgaagtctgcatactgctgcgggattttcattacatatcctaggcgtggcaataccagactcggacggttagaagtgatgctcgactgcaactcgacagacccgtcaggataaacggtccagatttgattcgtcgtaaacttgaaatcattttccccgaatctcctatctgtcagttcctctatactattttttcccgtactggttccacctttgatcttagcaccgttcggcgcctgcgattcgacagtgaaagccaagacgaccgtaccgtcgtttctttccaaaaccgtactattcgttgcccgatgttgcaggttatgcaagccgtgttcaaaccactgcgaatagaaccagttgtcgttattggtaaaagcgcgcaaagcatcgagcttcggaccgtttccatcggttataatcgtcttgcctccgtaggccaggctgtaaatcgtacccgtctccatatcgaacttagcaacgaaaccgtcaccactcaccgttttaatcgaagtatccgatttatccaacttcacctttccggcagaagccgtcacggcactgatggaaggacgcgctatagcttcctgcaacaaaatttgttcctccgccgtcacaaatcctttttcagcccacggcatatcatctttaagaaggaactgcacctttacaaaatattcggaatcattcttcaacttgtcaaaaggcataggtattgacacttgtgctttggcacgggcaggaatcgttccggaattaaccaaaccgaatcgaatctcctttccgtcttcataaagcgaccatcttatatcataatccgaaagatccttaaaatagtatttattgaatatctcaaaaagccccttcctgacatcgaccgctttcacaccaatatgctgatagactttcttcacttcataatactgcggtttcggttccagatcaccgaacacaatgccattcatcacgaactgaccgtcattcggagtatcaccgaaatccccaccgtatgccaaatatcgcttaccggtctttttatcatagttatacatcgactggtccacccaatcccagatagcaccgccacagaaaaaatttgtcgattctatcgcttcccagtaatccaccaggttaccgcaggcgttccccatcgaatgagcatattcggaaatatggaacgggtatttgatatcataatcaccttttaccgcaccacgcgtccagccaatagacggatactggttcgaccccatatccactatatcattattacgttcatattggacgggacgggatttatccacctgcttcaacgcatcataagcagccacgaagttttcaccaggtcccgcctcgttacccaacgaccagatcacgatagacgggttgttgatattagcatgaaccatctccatcacacgtgcgacatgcgcctttttccattctaccggatgtgaaagggaagcggccccgtaataatattcatgcgactcgatattggcttcgtcttccagataaagaccatatttattacataagaaataccagtaaggatcatccggataatgcgaattacgcacatggttgatattggcacgtttcatcagcatcacctctttttccatcatatcgcgcgtgatggcatgtccgaccgccggattcgattcatgacggttcacgcctttcagcttgacggtcttaccatttatataatagtaacgtcccgccagcccgaattcatcttcttcagccggtgtatccttgatctcgaccttacggaacccgacgatcgtagaggttgtctccaccactttccctttagcattcttcaactctgcaaccagcgtatagcgatatgggaactctgccgaccatttccggggagcttttacattcaagacagctttcgtggtctgtatctgtccgggatttaccacatccaccgctgccgaaacaagcacattttccactttgacgttttcatccgaatacaactcattggcatacaacgcatattccaatttatatcccttcgcaacctttttatccaagttgcatacatcggccgagactgccagcgaaccatccgtataagtcacatccaaatccggaatcgccaccaaatcgcgcacatacactttcggaaccgaatacagagcgaccgtccggaagatacccggcaggcggaacatatcctgcgcttccaaaaaagaaccgtcggaactgcgatatacttcagcggccaccacattcgtccctttccggaggtaaggagtgatgttgaaattagccgtattgcgggagtttttggaaaaaccgacatattgaccgttgatccagagatagaagaaagaatcgactccatcgaaactgataaaaacttcgcgtccgtcccaatcctgcggtatctcgaaattacgacggaaagaaccgacttcattccggtgcttgtaagtcgtccagtttgctggcggagtacgcatcacacctccgcgccagtcatcgaccgccactttatgctggaagattaccggctggttcacatagatcggaactccatatttcaagctaccgtctttctggactccataaatattccaactggaaggaaccgggatattatcccagccggatacatcaaactccgtcttatagaagtctttcggccgtgaatcgggatcaggcgcccaattgaacttccagtctccatccaaagactgccaaaatttactgttttccggtaataccttacgagcgctttccacatcctggaaagggaaaatataagcatgcggttgttctttgttcagagccaggttctcaggcgactcccactctttaccggtcggtgcttccatcggtccgtaactaaatcccccaagcgacaattgatcagccatgctatagaaagaagcacagcaaagcgctaaggctaacgagatttttttcatgatgttcatttttaggaataatagattttatttgtgtattcattcttagacatgccaaatcgttcacaaatataagaaattaacacagcatataaaagaacttccagggcaaccgcaccaaaattcggaaatcccgtttcccatccctgcaaatcactccattattttctgcaaaaacggctataaaataggtaaaaccgggtggtttttattgtccggcatggtactttagttgccagacacccccatgttgccatcctttacacccgggtgtagagggccggtacatccgggtgtaaaggatggcaacacgggggtgtttacggaattatgtgcttgtctttgctaaaaaaagagagggcttttgtgagatgaagaaccgtatttcacctatttaatacctattatattcgtttttacatttgtttattcgattattttatatgttttctcaaaagcaaaagaaggtaacatattagctatcaattatataataaattccatatgtttcagaagtgatagaggagtgatagaggaaaacgtcctgtatcacagcctctaacgattgaatatcaataactataaccttcgcagtgatagagtgatagaaggatttacaaaatggctcttacgctgtaatgtctgtcttttcttaaaataatctacattcccaatacattttcctccggcctgtcgtatatttgtagtttaataattagaagcaatggcaattcaattcagcatacacataactttctgtttatgaaaaaaaatatattcctactctttctactctttaccgccgtctcgcttcaggcgcaatacccgttgctcagcaaagatgccgagatcagcctattgacagtttcgccatcggaagacgaagtgtacacggtctacggacatacagctttgcgggtaagagatgcatcgaaaaaactcgataccgtatttaattacgggatattcgacttctcgaagcccaacttcatctatcggtttgcaaaaggagaaaccgattacagactggcagcacaatatacacgcgacttcctaatcgaatatgagatgcggggaagcgaagtcaccgaacaaatcctggatatcgattccgcaggaaaagcacggatatgggaagcgttgatgatcaataaccggccggaaaaccgcgtataccgttataatttctttttcgacaattgtgcgacgagacccgctgccatcatcgagaagctggcaggtggaaaaatagattataacataccgttcaagcagcagacgttccgcgatctcatcaactactgtacgcgtaacaaaccctggcttacgttcggatgtgacctggcacttggcagtccgaccgaccggatcgcgactccccatgaaatgatgttcctaccgccctacctgaaagaagcgttcggtacggcaaccattaccggtgcagacggttcccggaaggaattggtaagttcaaccaaaacattgataaacggactcaccgatgaggtaaaaccagatacgggcttctttacgccgcttgtttgcagttgggcctttttcctggttgtgctggctgtcacattcgttgaatggcgacgtaaatcctatttcaggattgttgattgcatcttgtttttcacagctggaatagcaggaatcgtactgtttttcctgagtttcgtttcgacacatccatgcgtttgcccgaactggaatattatctggttacaaccttttgacttagcagctgttattttgtttacagtaaaaaagttaagaaaggccgcatattattatcattttattaactttgcggcgcttacgctgatgctggctggctggcatttcattccgcagcatttaaatacagcatttatcccgttggtaatgagcctttggctccgttcgggatatggcgtttacagaaaaatatggaacatcgggtacgaaaaatattaacatcgctcatcgcaattctggcagcaaccaacctggaggctcaacaaagcactcccaaattggtcgtgtgcatcactgtcgatcaattgcggggtgattatatagaatacttttataatacattcggcgagcgtggtttcaagcggttgatgaatgaaggactggtgtataacaacatacggttcgaattctcagacatagatgaagccagtgcctttgccaccctattcaccggaagcaatcctaatttcaatggaatagcgggaaagaatatctacgattttgacaaggaaaaggaagtttcggtcttatatgacccggactatatcggcaattatacgaaagagcattattctccccggaaactgatcagctccacaatcggagacgaactgaaaatcgcttccaaaggcagaagtgacgtatatgccattgctcccaaccccgaaagtgcgatcctttctgccggacatgcggcaaacggtgctttctggatggacgattacaacggcaaatgggcaacaacgacctactacaaagggcttccttggtatgtggaccgctacaacaacggcccggaatctctgtcggcacgtttggagcagatgacttggactccctccctgtcactggataagttcaatgcatttccgtacgtgttagatgaaattcctttcaaatacacattcaaggaaaatacaaacgagtgtttcttcaacttgaagacctccccttttatcaataaggaaatcaaccgcttggcgcttcagttcctcgaatacggggctttcggtacacgttcctgtccggatatgcttgccatcacttattatgcaggcaattatcgcggcaatatgcataaggaatacacccgcgagatacaagacacctattatcagttggacaaggatctggagcagttgttggacaagatcgacaagaaggtcggactgaacaacacgctgatcgtctttaccggttcaggatattataagagtgaagaagaatatcctgacggcatgcagctgacaaatggcgaattccatccgaaacgttgcgtcgccttactcaatatgtacttgatggcgatctacggccaacatacgaattgggtaaaaggattctataacaaccatatctatctgaaccgcaaagcgatagaagacgcgaagctggaactgacggtcatacaggaaaaggcggccgaattcttgcgcgaattcagcggcgtgcaattcgttgcaaccgagaatgtccttcgtacgggcaactggaatgaaaagacttccaaatacctgcacggcacccacctttcaagccgtggcgacctgatcatcgagttgcagcccggatggaccatcaacaacgacgatccgaaagcgaaagtaaaagtaatacgaaataatgcagttataaccccgctggtatttatgggcaacggtatcaagccggaacatatctaccgcgaagtaaaagccacagaggtagccccaacggtaacccatgtgctgaggatcagaccccccaatgcgtccctcagtctaccacttagagaattgacaattggcaatggacaattggcaattccatctaaataaatatccattgacaaatacaaacaaataaaattagtaaccatccaattgaaatcgtcaattgcattgtcaattgtcaattgtcaattatcaatttaataagttatgggatttaatgaatttatgacgaagctgttcggcaataagtcgcagcgtgacctgaaagaaatcaccccgtatgtggacaagatcaaggccgtatatccgtcaatccaaaagctctcgaatgacgagcttcgtgcaaaaactgatgaaatcaaacaacgtatccaggattacgtagccgatgaacgcgctaaagtggaagaactgcgcaaaggcatcgacaacaaggaactggaagaacgtgaagcgatctgggcagaagttgacaagatcgaaaagaatatcactgaaaagatggaagtggtactggaagaggtacttccagaagtcttttctatcatgaaagatacggctcgccgtttttctgaaaacgaaacgatcgaagtaacggcaaatgacttcgaccgtaacctggctaccaaatacgactttgtggaaatcaacggcgacaaggccatctatcacaaccattgggtggcaggtggcaacgaaatcacctgggatatggtccactacgacgtacagttgttcggtggtgtcgtactgcacaaaggcaagattgccgaaatggcgaccggtgaaggtaaaacattggtggctactctgccggtattcttgaacgcattgacccgcaacggtgtacacgtagtaaccgtgaacgactacctgtcaaaacgtgactcggaatggatgggcccgttatatatgttccacggactgtcggtagactgtatcgacaagcaccagccgaactctgatgcccgccgtgccgcttacaatgccgacatcacattcggtacgaacaacgaattcggtttcgactatctgcgtgacaatatggcgatcagcccgaacgacctggtacagcgcaaacacaactacgccatcgtcgatgaggtcgactccgtgttgatcgacgatgcccgtacaccgttgattatttccggtccgatccctcgcggcgaagagcagctgttcgaacagttccgtccgaacgtggaagtagtcgtaaacgcacagaaagacctttgttccaagatgctgatcgaagccaagaagaaaatggcaagcagcgatcagaaagaggtggaagaaggttctatccaactgtaccgttctttcaaaggatatccgcgcaacaaggcactgatcaaattcctgagcgaacaaggcgtaaaagcccagatgttgaagacggaagaatatttcatgtcagaaaacatgcgtcacatgcatgaagcgacagacgaactgtacttcgtgatcgacgaaaaaaataacagtatcgaattgaccgataaaggtatcgacttgctgaccggcaagaccgatgatccgacattcttcgtattgccggatatcacctcccagctttccgaactggaacatatccaaaacgaagaagaaaaacaggctaagaaagacgaattgctggccaactattccgtcaagagcgaacgcgtacatacgatcaaccagttgttgaaggcttacactttgttcgagaaagacgacgaatatgtcgtgatggacaacaaggtcatgatcgtcgacgaacaaacgggccgtatcatggacggacgccgctactccgacggtctgcatcaggctatcgaagcaaaagaacgtgtgaaagtggaagctgcaacacagacatttgcaacaatcaccctgcagaactacttccgcatgtatcacaagctgtcaggtatgaccggtacggcagaaacggaagccggtgaattctgggacatctacaaactggatgttgtcgtaatcccgacaaaccgcccgatcgcccgtaacgacatgaacgaccgcatctacaagacgaaacgcgaaaaatataacgccgtaatcgaagagatcgtccggttgaccgaagcaggacgtccggtactggtcggtacgacatccgtcgaaatctccgaattgttgagccgtatgcttactatgcgtaagatcaaacataacgtcctgaacgcgaaattgcaccagaaagaagctgaaatcgtagcgactgccggacagagcagtacggtgacgatcgccaccaacatggccggtcgtggtactgacatcaagctatcgcaggaagtaaaagcagccggcggtttggccatcatcggtacggaacgtcacgaaagccgccgtgtagaccgtcagttacgtggtcgtgccggacgtcaaggtgacccgggttcttccgtattctttgtttctctggaagacgatttgatgcgtctgttcgcatctgaaaagatagccggattgatggacaaattagggttcaaggaaggtgaagtgttggaacacagcatgctgagcaaatctgttgaacgtgctcagaagaaggtggaagaaaacaacttcggtattcgtaaacgtctgttggaatatgacgatgtgatgaactcgcaacgtaacgtaatctatacccgccgtcgtcatgctctgatgggagaacgtatcggtctggacgtattaaatacaatttatgatacatccgttgcaatcgtcgaccagcatgccgatggtgactacgaaggtttcaagctggaactgttcaagactttcgcaatggaatgtccgttcacggaagaagaattcaagaacggcaaagccgacaagctggccgataaactgttcgatgaagcgttgcagctgttcaaacgccgcatggaacgtatgactcaggttgccaatccggtgatcaaacaagtttacgaacatcagggtgcgatgtatgaaaacatcatgatccctattacggacggtaaacgtatgtataatgtttcctgcaacttgaaagaagcttacgaaacagaaagcaaagctatcacgaaagcattccaaaaatcgatcgtcctgcatactatcgatgaagcttggaaagaacatttgcgtgaaatggacgaactgcgtcactcggtacaaaacgccagttacgaaaataaagatcccctgttgatctacaagttagagtcttacaacctgttcaagaacatggtggatatgatgaaccgtaagactgctgctgtcctgatgcgcgggcagatccctgttcgcgaagaaccgaccgaagaagaaaagcaggctatggctgcccgtcaagcagctatggaagaggctgcccgtcagcgtatcgctatccaaagagctgaagccgagcgccaccaggacatgagcaaatatcgtactgagaagaccgatatctccggtaacaacaatccggaagaacgtgcccagcaacaaccgcgccaggaaccagttcgcgccgaaaaacgcgtaggtcgcaacgacccctgtccttgcggaagcggtaagaaatataagaattgccacgggcaaggtttataatcctatcctgtaagatcaaaacaaaggcggctctgaaggtcgcctttgttttctttataaatctaaaaaaacataaaatccttttgtctcttacattacacttactaccttagtcgaactaatttaaatattacatttaatcaccatgaagaaaattatcttattactggctttttgcctgagtgtaggcaatttattcgcacaagatgcgaacgcagacaaactgcgtgaagaaggagacgcagccatgactgcaaaaaactatcccgaagttgtagcaaagtacagcgaatacttgaaacttacaaactatgaagatgaaagccgtatctttaactgtgcatttgcagcttacaatgccaaaaagtatgacgatgccatcaagttctacgacatggccattcaaaagggctataaagcagacgacgcttatgtaggcaaagcgatgtctttgcgtagtcaggacaaagctgccgattttacagcaacagttgaagctggtctgaaagcaaatgcccaaaacgcaaacctcgaaaaacttctgtatgcttattgcatgaagaaaggacaggcagcccagaaagcaggtaagacagaagaagcagaagaactatttaaagacgtattagttgtaagtaacgccaaatataaaggcaacgctctgtacagccttggcgttatgttctacaatgcaggtgcaaaaattctggccgatgccaacccgatcgcaacatccgatccagacaaatacgctgctgaaaagaaaaaagcagatgctcaaatggcaaaagcaaaaggttatctggaacaggcagtcgctttgaacgcagccgatgctaattccaaaaagattctggatgctatcaatgctgctgctaaataaagtataacgcaataattaaaaagaggacttcggtcctctttttttatttatacaaaaagcgaatcatataaatccgtacgacagagatccggcataatatcagccacactggaacaactatcggccggtgtttattcaaatgttaatcctttccaaatcgtccggtacataaacggttccggagaatgcctgtgcagcttcacgcatataagattgcttgcgggtatccaagttacggtcttcggtgtgatataagaccaaattcttcactcccaattccgcagccaatctcccggcgtccaatgccgtactgtggtgcttcttataaggttggaaaacttcccgatcctcatacaagcaaaaggcttcgcataaaagccagtccgcattttccacataagagcggtttatcacattataaggttcgtctcccagacagacaaacgactgtccgtccggcagctgcgttcgaaatccgaactgtttttctttggtggatgcgatatcgaaacattgcaggcataaacctccggcttcaaaggtctctccatccttcacctcacgaaactcgactgcgctcccgatcaatgcgacgatctttgccggcagcaatttccggcagatccaatccagcacttccaacaccttatcatgtccatgcacccggaaagtgcccgtatattgtccggacagcattttctgcataacgatacggaccatccagacagcccccaatatatggtcggtatgagcatgtgtcacaaacatatcatgtatctcgcttatcgcgattcccgctttctccaactgtcccaatataccgttgccacctccggcgtcgaccagtaagatgttctttccggtcttaatcgtgaaacaggtgttataacattttgtaacggtagcattacctgttccgagcatagtcagttcagtagtcatattttcaatcataaatgtaggtttatctatattttattacagttacttattatcattccgtccggtcaagcctgtacgcccgatactactcgaacaaaattctaaacctcgtcaatccgtccgcatacgtcctaagagaaaaagaacagttgtgcttttgaagcacttcgcggataaagatcaagccgatgccctgaccaccgcgtttggtggaaaagaaagggctgaacaacttggcctccgtttccttatcaatgcctttaccagtgtcggcaatctccaggcaaaccggattacgggaggtacggatataaatctcgccatcgtgaccgatcgcctcggaggcgttcttgatgatgttgaccaatacctgttcgaagagagaattgtccagactgacaatcggcgagacggagtccagctccatcacgatccggatattccggttcagacagatcgtttccataaaacgtttgcaagaaaagacaactgcattcagcggctgtgtcttggtttgcggctccggtatgcggaccacatctgcaaaattcgtgataaaatggctcatactgtaacaacgctctatcgaaacgcgcaaaacttcacaaatatcttccgtgtcctgcatctcgctgaaggtcgcttcaagcgtatccaatgtagaagtaatgccagcagtcgtgttattcacctcatgggcaatcatgcggatcaccttttcatacgctttcttttcggccttgaagacctcctgcgtcaacatttccaccagatagaacgaatgatggaagccacggtccacaaacgatgaatgtgtacatttatagatattggcatcgttcaggcgaactgtctgcgaatcatacaaggggatcggctccagctctgccgccaaaggtgaatccaattccgacagacgcttacccacaatatccggcaaggaagagatccccaacatcttacgagccgccggattaaccgaaaggacttccttatcgagattcaacataatcactcccatcggtgaagcattgatcagcagatccagaaaatgattctgttcccttaaatgcagtcgttcgttcttcaactgttccatcatcttgttgaatatatcgacaatacgatctgcctccttctgtcccacacggctcagacgggaactgaaatcctgttccttcaacagctccataccgttcccaatgatatgaagcggcttgatgatacggcgatagaacacagacaaatagagaaccgtcagaagtacgagtccttccaccaagaagaacagggaaaccgattccgtatagaaagcatgataggtaatgattgccaatacagacaacagcaatgcagtcaatatccaaaacagtccttttattctcatcagccgggacgatttacttgtctacaggtatatcatatttctctagacgacggtacagggctgcccgactgatgccgagcgccgtagcaacgtgtgaaagattaccggcatgtgtcttcagtgcctggagaatcgtttgcttttccaactcgtccaacgtcaggccttcaagcgaagaagcagcctcagcctttgccgacagcatcgtatggaagcactggctctcgaaatcagaggcttccaaaacagccttgcctgataccaatatcgtccgttccaccaaattcttcaactcacggatattaccaggataaggcagcttttgcaggaaggtcaaggcttccgacgaaaagcggacggtaggcaagccgtttatctccgattgtttgtcggcaaaatagcgtaccaacagaggaatatcgtctttacgctcacgaagcgcaggtaggtggacggttatcaagttgatgcgataaaacaaatcttcccgaaacatgcgctctaccaccatttcacgcaggttacggtttgtcgcgctaaccacacggatatcgactttgcgaggacggctatcgcccaaaacctcgaacgtctggtcttgcagaacacgtaacaacttcacctgacaagacagttcgagatcgccgatttcatcgagaaagatcgtccctttatttgccatctcgaaacgtccggtacgatcgatataagcatcggtaaacgctcctttcttatgcccgaacatctcactctcgaaaaggctttgcgaaagtccgccaaggttgacctttacgaacggctccttcgcacgtgaactgttcgtatgaatcgcctcggcaatcaattctttgcctgttccactctctccggttatcaggactgaagcgttggtcggagcaatccgggaaaccgtccccagcacatccatcaacggagcgctctggcctatgatcttgtcaaaatgaaatttattatcggcatccaggcggttcaatggcattttctgctccttcttctgttcacttagttcgatcgccgtacggatagatttcagcagtacgagattattccaaggtttagtcacaaaatcgaaagctcctgcttgcattccctgtacggcaagcgaaatagatccccatgccgtcatcagaataaccgggacatcgggctggaataccttcacctgcttcagtagttgtataccctcttcaccggtcgtagtcagtgtaaagttcatatccatcaggataagctgcaacgtcgtctggcgtacgacaaccaacgcctcttccggccccggaacagcttccggttcgaacccggctcgtttcaacaagaaagttagcgaagaacgaacggcagcatcatcgtctattatcaagatcattgatttatgatttcaaatttatgatttgcaaatttatagaattaaatcaatcatcgcctcacgatcttctcaaattccgcatcaagagtctggtcattaatgaaatcataaagagtgacgctgcgtatattgtaatagtagttccaatagtcgtacaattcctggatatgcttctgtttagcctcatccttcgattgttgtgcatcgttcaggtccagaatattgatctttccgatcatgaatgtctcgatagaagtcttgtagcgcttctcggcaatcacatcagcttcctgagcgatctccaattgggcagcctggttattaaagttttccaccaacaggaaaatatcctgattgaaactgatttcctcctggcgaatcttggacaatgtcacatcgcggttagattcggcaaccttcactttgccccggcgcttaccccagtcgagaatcgggatcgtcatgccgacttccaccacctggtttccctttaaccggtgataggcagcatcaaacgtatggtcttttccggtgtaaccgatcgtggcaaaaaggttgatactgcggcggtttcctttggcagccgcgacctcgtaatcggcttccagctgacgacgacgaatattcttggcgaacgaattgttttcctgtgctttctgtaacacaacctcataaatcatccgtagagaaggagcggactccggcaggatcggctcgatcacttcctgttcgctcaaccccaaaaaagcacggagctgaaacatattggcattgagaccggactgcgcctcagtcaacttccctttcatctgcaaggcagacaacttcagctgcatcagttcactctcggagatatgaccgatcttacgcttggcaacagctatctcgtacaatttatcggcattttcaaggttctgcctggcaatatgcaagttctcattcgccagcaacaaattgaaaaaataaccgatcgtgttgatcgtcaccccttccacactctcgatataagcggctttcgcttcctgatagcgtacaggctcaatacgccttttccatttctgatcgttcacaccgaaaatcggttgcgtaagcgtcaacccgataggcacgctcatatattcgttgaaagcccctttccccaactgccggttgaaatcgagagaagagttcaacgatatcttaccacctgtcaaagctatattctgatcaatcgaaatctctccgttcaagccgagcgaattattttggacaaaagtgtacgaaccatcggactgctggtatttggtatactgtttactataagctggaagcgtccctttgaagtttatctccggtaactggtcggcaacatgtgtacggtattcccaataggcagttttcagctcgttcaaggcaactgcagcatccaccgattgcatttgcgccaagttaatcgcttctttgagggtcagcctgacagtatcttgttcctgtgcctgcaatccgacatccgataacaggagagaaatgatggctatatagatctttttcatcgtaataaatgttttgacccaccattggcaaaagctatgccaaaaagatatatgactgattatctgcaacatgttccaaacaacagtgtccgaaaatgaacagagtgtccgtttttgaagtattattagtatctttgtctcgttctctcaaaacaataaataatatgaaaaacagcggcttcactttccgtaaacgactagccagtttccggtatgcttttaacggcatccgtttattgatacaaaaagagcacaatgcgtggatacattgttttgcggctatttgtgtggttattgccggctttttcttcggtttatcccagacagaatggatagcggtcgtgatcgtaatcggagccgtattatcggcagaagcaatcaattcatccatcgaatcattggcagatttagtctcacccgaatacaacgaaataataaaaaaaacgaaagacctcgcggcaggagccgtcttaattatggcaatagcagccgccatagtcggatcgattatttttttccctaaactgggattctgaatgactatttaaaagaatagtcctttatttcattgttttacaattctcttttcctatatttgtgccattattaattaaacattaaaacaggagattatggcacgcacagtaaattatccgaaaagagcggaaaaaattaaagaaatgattgatgatttagtaaaggaaatgggacattctccacacagaatgtctaaaaaagacaaaatcaaactcattgacattgactttgaaaatatcgacgttgtaacactaatgcaagtacaggcacgtatcagccgccttattcttgaaaaaagcaaataaacgcaaataagacatatctataaatgaaacgaattcttaccctgattttcatattattcgtttgtttatcgggaaaggcgcaggaggttgagataagcggaagccgcaaggctgtccgtacgtcaggtgacgtgttggcgtttgtaacgcctgtagcgagtttgaccaccgtattggtgttgcaggattggaaaggattgaagcaaggcgctttggcaggagtttctactataggtatgacatacgccctgaaatatctgatcaagaaagagcgaccggacggtagcgacaaacattcgtttccttccatgcacacctcagtttcatttacgggagctgcattcatccaacggcgctatggctggaaatggggaattccggcctatgcgattgcctcgtatgtcggatggagccggacgtatgccaaaaagcacgactggtgggacgttgtggcgggagccgctctcggagccggaagcgcttacatttttacccgtccgtttgccacgaagcataacctgtctatcagccctgttgcgagtgataaacacttcggcatatatgcttccatgacattttagaaaattaagcccggcttcacagagatcataaagccgggctttttcatacaaacagtgagccatattaagccttgagcttttgaaatccaaacgattatggataaagaattacctgaatcagcattaggcatcaagcctcccaagtcgtatatccgcgtcagcaaaagtaatctgcctggctacaaaggctataaagccagtgtcatcttccgcagtacgatcggcattgaaacgatcgccgaacgtattgttaagaaaagaaacgtatacggtaaagaaacccttgtcacggctttcaatataatcaaaaacgaaatctatgaggccatcgaagaaggctttaacgtcgacttcggtttcggccgtacggagatcactgcaagcggtagcttcgaaagcctgggcgagaagttcaaccgcaagaaacataccctcacgccttgtctccgtccttcgcctcaactgaagcagcgcacggcacgcatcccggtcgaaaacatcacacaggaaacgttcgccaatgctccgcgtccggcctatgtcagcctcaagatcgaacctcgcactgctgacagcaccgaaccttacaaccagcttcctgccggacgccatccgttcatctcgatctacggcagccgcctgacgctgatgggcggcctgcccggcgtcggcgtcaggctccggtgcgtcgctaccgatgaagaatatttctatccctccagcaagatgtccgtcaactcggtgaaccgcctttgcttccccaccgacatcgactttacgcccggtgaatgggaagcgatcattggtagccagtacactcctacttatcatttatataagaaggaacgttacggctatctcacctttaccgttgtgtgacacctcgatggttacctgcattgagtatgcctcatagttatgaggcttattacctcataggtttgaggctacacacctcacaggtttgaggtttatcacctcatagcaatgaggcatgtcggatgcaggtaaccatcgagcctgcaagatatctgtgttcagagagctgcgcaacgctttgcgctctttacatcacctgccgcccatcgaagaagcgcacggtgcgtgaggtctggcgcgcctgctcttcgttatgggtgaccatgacgatggtgcgtccgtcttccttgttcaatttgtggagcagttccatgacttcagctcccatcttggagtccaggttaccggtcggttcgtcggcaaggatgatgtcgggattgccgacgatggcacgggcgatggcgacacgctggcactggccgccggagagctgcgtcgggaagtggcgcatgcggtgcgagaggccgaccttttcgagcacggcgacggcggcttcacggcgttccttggcgctgaccttacggtaaagaaggggcagttcgacattatcgagtacgttcagcgaattgatcagatggaaagactggaagacgaaacctaacttctggttacggaactcagccagttgcttgtcattcatattgatcgtgttgattccggcaatctcgaccgtgccggaagtcggagcgtccagtagcccgatgatgttcagcaacgtagatttaccacaaccggaaggccccatgatactcaggaattctcccttattgaccgtcaggttcacgttctccagggcaaccgtctcgatttctttcgtccggtagatcttctcaagatttgtaagtgttatcataatcgttattgtttgttgtagacagggttgaagctgcccgttgttattatattctttgtatgtgcttctaatcggcaaattgcgtaccaaagaagtaaatatctattaatcaattatcagacaaaacacaatgtgtccaatattgaacacattgtccgtttttgcatcactcgtaacgtaacgcctccgccggagccaatcgtaccgccttgcgcactgggaaccaaacacctatacagatcatgacacccatcagaaaataggtaaaaccgaaagtcatgagaaaacgcataaatgtaagcggttggcggtaagaatcgagctggtccatataaaccatattaaaggcaaagatgatcaacaagggcaatgtaaaggcaagcaaacaaagtccctcggtatacatatagcgttccaacgtgatacggtgagcccccaaagccatccggagcccgatctctcctttgcggttctgcatacgaagccagaaagtgccgatgataccaaagaagacatttaccagcataaaggccatcaaggagattttgttattcgcctcccgttctttctgactcaattgctgttcacggaaagaggagatcggggtaatgccgtagacataaagattgttgaccttcagcctctctcccattccgtccaggaacaggttcatctcgttctgcgtataaggacgtttcatccgaacacagaactctgcgctgctggcaccgaagctactgacagttgaattgtaagtttcaccttccaagcactggaaataagaggcttccggacgttcgtattcgttcgtgcggatggaagtggaaaccgcagcgatctcggatgacagatcatgaccgccatgatacacgcgacgaccgacaatattcggggcaccgtgatagaaaccttccgccatttccggtgtgatcacaatcacgttatgccgtccggcaaccttgtcgtagaccggttccccgtcgaccgtccggatacggaaaaggcggaaatattccggtgtgacattgcgcatttggaacgactccatatgggccgcatagatcgtgtcgccatccaccggcttgacttccctccaggaattgccgttcgaatagggacaagaatagaaagtgacacaaacatcctccacttccgggttctgacggatctgagtcatcaaccgcgtcaaatcttccggatcggacgaatgatagagagaatcaggcatgtagcccggcgcctttgcatccaaatcgcttaacttaaaacgccatacgtttccgatatcgaagcctaaaggagcatgatatgtccggtaatccacccagaacgtatctatcatcatccagagcactgcagccaccaccgccaactctgcaaatatccagccgttgctgcggcgctggttccacattatctttaaaatatgtctgatcattgtattggatttatttattgttcaatgcttccacaatttgttcacgggagatccggattgccggaaggccggcgctcagcagattcaacagcagagtgaagaaaagggcggcggcaaacaggacaggcttgaaaagcatctcgaaagtaaccactgtatcctttgtcaaaaggaacgacttgccgagttggagcaagataacagacaggacgattccgatcaagcccccgatcagagtgataatcagattctcgcataagacctgcgtcaacagacgtcctttcgttgccccgaacgctttacgaagccccacctcggagcggcgtttttgaacggacgattggacgacacctgtcaggttcaatgtcggcaccaacaacaggaacaacaacaaaggagccgtttgcgtcagatattctttccatcccctccggatacctccgtccatatcattcgatcccaacgctacgtccaagcgggaaaacacgaagttcattcctaagacaaactcacggccggcagcattataacggctgaccgcttgtttgatttccgcacggatcgcctcgaaatcacttgccgaataagctaggataaccccttggaaactaccgcagacaccaccgcacgacctaccgttcacataattcgtattgctggtatagggaacccaaacatccgcataagcactgttggctgcccgcgtcggagcttccaccactcccgtaacggcatacggcacatagcccatcaacacctcttttccgatcggatcttccgatccgaaaagcttgcgggccaacgtattcgtaatgaccacacgaggcaagccggaaatgaaatccgcctccgtaaacggtttgccggaaatgaagcggaaatcaaagaccttccagaaaccgggatcggtatactttatcacatactcctcgaacagctggcggtccgacagcgagacgatcaccttaccactcgctatcgccgtcaccgcttcgggggtttgaagcggataaagacattccttcacgacaccatcggacatggcggtcgaattccgggtttcactatcccgtgaatctgcccgtatccccatgatataaagcatcctgtcccggttcgactccggtcgaaaaccgaccagcttgatttggaactggagaatcaccaccagtatcatcgcaatcgaaagtgccgttccaagaatcgagatcacactggtaaggcgattctccttcaacatctggatagcttgtttaaaatactgtctgaacatgagaaaagatatttacgatttataatttatgatttcttgcttatggccaatgatgaacatcccataaatcttttcattcataatgcaaagcctccgccggattcatctttgcaatcctgcgtgccgggaaccagataccgagccagatcataccggccagcaacagacaactgcttccgaaagtgacaagaaaacgccaccaggtgtaagccaatcggtctgtgtccggcaaatcgaaatagagcatattgaatataaacaccaaaaccaccggaatcgtaaagatcagcaagaaaagaccttccacgttcaaaaaacatttcaatgtgccacgggaagcaccaagagccgaacgaagtcccatttcaccgcggcgatactgcgtacggagccaaaatgtgccgacaataccgaaaaagacattcaccagcataaaaccgacaagagctattttcttcttcagattgtctatactgcttttcagtataaccggacgttgttcctccaacgggatgacactcgatacatacaggttattcactgacagccgttcacccattttctccaggaaactatccatatcttccatacgaaacccgtttctcatgcggaccagacagtccatattttgaggctttgcatcggaagctgatttggcaatatcttcgtcggtcctcatcaaataatagaagcaaggtttgcttttcacatattcgttctgacggatgggagaggtaacggcagcaaccgtttcggaagtcgtactcttggaaccccatttcacctgcttacctttgccggaccgcccttggaagaaatcagtctccatatcccccgatatgacaatatcgcctgtactttcctccacgatcgaacgtatcggacggccctccctgtcactaatccgcaagacatcgaaataagaaacagtcacattaaacatctggtaataattggcctttacgcttgtatcagcatccgcccgtaccaactgggaccaactgttcgaccaggtatacggacaagaattcatcgccaaacatatttcatccacctgcggagcccgacggatgttgtcaaccaaacggaccagatcttctccatcggtagtcgtaagcaacgaatccgggacatatcccggtatttcagggctcatcttgccgatattcaccttataaacattcgttatatcgaagcccaacggcttgtaataggtatacagattcactaacaaagaatccatcataatacataacacggcaaaaaccaataatagttccacaaatatccaaccgttattccgccgttgatgccagattattttcaatatgtgcttgatcatcgtcttcttaatttataagttaaactattctccgtctttcagggatatgacaattttctgacgggcaatgcgcatcgccggtatgcctgccgaaagcagattcagcagtaagctgaaaaacaaagccaataaaaacacagccggctggaaaatcatatccccgcttaaagccgtatcacggctttgtagcaaaaaatctttgcaaacaggcaaaagcaacagggaaaggagcagaccaaccagaccgccgatcaacgtaatcacactgttctcgtacaatatctggcgaaccaacacgccgtaagtcgctccaaatgctttacgcactcccatctccgcacgtcgtttttgcacggcagactgtgttacacccaacaggttcaaagcaggcacaagcagcagaaacaacaaaaggctaccggtttccaaaagataatctttcacatccaccttacgttgcccgatcgaaccgatcgctatgtcaaaacgtgtaataggattctcgaagaaattaatcttcgcatcctgcttcatcccgttataacgttctatctgcttcaacaattcatgccggatcgcttcgaaatcacggctgtcctttgccaacaggcagatagaaaaccagccggccatattttcggaactggtattcgtcatcaggatacggtcggtcgtataggggacccacacgtcaccgaaagccgtatcggcggcacggctgacgtctttcaccacaccgcaaaccgtataggctgtcaaatcgattatcacagtttttcctacaacgtctgtcgttccgtataatttccgggccacactctcggacacgactgcttgtgtaatccccgaatcaaaatccgcttgcgtaaatggtttaccggtcagaaagcggaaagaaaagactttccagaaaccggtgtccgtatatttgatctgatatcctttatacatccgtttccctggtatggataaaggcttcaactgcatggcataaccagaaaccgcttccggtatctccaatgaatagaaacattccttcactgcttcaggagacatgtttccccggttccacccattacaggtcttcacttccgtcccactatccacatacatcatccggtcgcggttgttctccggataaaaattggcgaactgtatctggaacaccaggactaccaccataatcatagcaatggagatggctgtacccgctatggaaatgacactgacaagacgattctccttcagcatctgaatggattgcttgatatattgcttgatcataaaacttactattacacgttaatcttctattttcaatttgttcttgtctttataagcgttcatgtccgagacaatgacctggtcaccttcctgcaggccactaaccacttctacatattcgaaattactgtctcccaactgcactttgcgtttcaacaactggtttccgtttacgacaaagagttcgtattctccttttcccacataataagaagagttggcaatgcggagcacatcgtctttcacagcattcatcacatagacatcggtcttcaaaccggaacgaagacgcttatgattgtcttcctccaattggaccgtgaaagagatcacgccgttcttcgacaaaggagtaacatcgctgaccgtcccgtccagtttttcactgccgatcttgataaccgctttactgccggcagcaatacggtctccgtaggtatcggcaatctcaccttcgatcttgaaatgagacaagtcggaaacgattgccaccttcgctccctggcctatctgcgagccgatctcgttgttcacataggtcaggatcgccttacgaggtgaacggatttgggcatcttccaacgtacgccgagtttcggcaaggcttttacggaagatattcagttccagctcttttactttcagatccgcttcggtcagcgcctgttcgttcttatatttctgctcgtcttccttcagtttgaggatactcacattataatcgagttccacctggcggactttatcggtcgtaccggctcccaagctgtctaaatagcgttcgttacggagttcgaccgctttacgatccagctccatgcgggagactttcaggttcatttccatttccgaaagtttgttgtggttcgtcacgcgttgctgttccagttgcaggctcttcatctgttcctcgtccaactgcttgttatattccgtctcggcgctctgcaaatccagtttcaggataggcgtgccgacatcgaccgaatccccgcctcgcttatacacctccacaatacgagagttgatcggtgaattgatgatttcctcaaacgcggggatcactttgccagacgcactgaccgaaacttctatcactcccttatcgactgtcgaaatattgaggtctttccgtttaaggctggtctgaagcatggagatcacgactacgatcaggacgataaaaccgccgacagctgtccctatcctgataaactgtttacgttgctcctttctctgtacttcttttgaaatctctctgtccatatttaatattgctttaattcttcttttcccggcatttctaccttgacggctttcacaggacaaactccgtgccaaaaacataaatcattgattatatgggaatacacttcaaaacaagtgttcaatatcggacagtgtgttcggttttgagaaaacttttccatcccggttgttgtttattcgtaacaaattaaaacgataaattatgaacactaaaatttcagtctttacgatcttcgtggggttcgccctgctctttgccggctgtagcaaagacgacgaaaacataccgggcggcatcgaacctcctaaaaccatcctggacgctttcaatgccaaatatccggatgcccgcgacacagaatggacagtcaatgacgattattatgtaattgactttgaaaacaactcgctcgataacaccgcctggttcgaccatctcggagtatgggccatgattaagacggacttgccgcttaaccagttgcctacggctatctcgaacgatatcaaacaaggcaaatatgccggttggaagatcgaggaagccgataccatcggcagagccggaatgggaaccgtatataaagtagaagttgaagttgaaaaggcagaacaggagactgacctgtattacactttatacggtgacctgatcaaagcggtcgataatgctaaagatgatgttgaccgacctatctccgtccccgaaaaagtggccgacctgatggaactgaccttccagggagcagagttgctggatatagaaaacacgactttcggtgtacagttggcaatcctcgacgggaagactttaaagattgtcgaattaacccagatatatacctggaaaagtacgacctggaaagtttcagagcaggaagtcccgacagttatcatggatgcattcaaggcttccgaatacggaaatgacccagtggaatccatttacatgtttaccgatgccaacggtgcattccacaaattcaatgtcatccacaacgggcaggccgtaacggtcgagttcgatgtgtttggaaatatcgttaccaacaaataaaaaacagataggcatcggattcataacggatacctgcccgtttccaatccgatgcctattcgcttttatcgggatgatcacgaaattcgacttattcgctgatcagttctatttttgcacttttcacacccggagcagaggcttcgaagacaatgacacccggtgtttcttctgtctgtacgactgccgtcagctgtcctttgaaaagggacatctgcggagcttggaaagattcgagtgacgaaggatcaccgttagcagccgcacgataagaaccggaaccgcggacgttgaacttcaccttgtgggtggcgtcgggacaaaggttaccgttcttgtcgacaacacggacattgataaaagagagatccttgccatcggctttcaggcggtcgcggtcagcagtcagttcgatatgatgaggcttgccggctgtatgaacttcctcttcggcaacagcattgccatccttgtcataagcaaccactttcaaggttcccggctcgtatttcgtatccatccacatcaggcggtaacgtttctggcgctcgaagctcttttgggcggcctccgtatagctgctgtccaattcaacactcagatctttcgtacgttttccttgactcttaccgttgataaacagctcggcagaagggtaattcgtgtacacaaatacaggcgtcacctccccttcacgtcccggccaggtccaatgaggcaggatatgcaacgtacgtaccgttttgttccaatggctacgatacagatagaaacgatccttcggaatacccgcaaggtcaatgatgccgaacagggaactatgacttggccaatccgtataataaggagtcggttcacccaaatagtcgaagccagtccacacaaactcaccgatacaatacggtaaatcttcatgctggataaagtcgtcttccggaagattggaccagccgcaatgttccacgtcgtaagaggaagcttggtggtcatcgtatttcgccatcgccttgcgttcgaccgggaatttataaacgccgcgggaacttactgtcgaggctgtttcgctgcctaaaacgatccgctgcggcaacttcttatagtttatcttgtacttgaaaggacgatagttgaaaccggccacatccatcacggctgcaaaattattgttgaccacggcatccggagcatccattccctgagttaccggacgtgtcggatcttcacgatggcagatatcctgcaaccatttggcaatcttgcaatccccttcgttccactggttgggcacttcgttaccgatacaccacatgacaacgctcgggttgttgcggaaattatgaagcaggttcacaaggtctttctccgcccattcatcgaagagcagattataaccgttcttgcatttagccacattccattcgtcaaaactctccgccatgatcatcatacccatttcgtcacaagcccttatcaattcaggagcaggcatattgtgggaagtacggatcgcattacaccccatgtctttcaggatccgtatctggcgacggatagcagcatcgttgacggccgcccccaacggaccgagatcgtggtgattgcaaacgcccttaaagacagtacgcttaccatttaggaagaaacccttgtccgggattatctcaatcgagcggataccgaaaggagttgtataaatatccttcagcttgtcgccttcatacagacgggtttccgcagaatacaatgcaggcatttcaggagaccataaagacggggcttggatgacaaactcctgctctgcctgattgttgttatatttcatctgcgcaagagaagtgcggacagccgtcagcttctgcttattcggattccacacgctggtttccacgctatatttggcgggatcggcgccttcgggaagcaccactttggtgcgcacgttcactttagcaaacttctcatttaccgaaggagtcgtgatataggtaccccaaaccggaatataggcgtcttcggtaatgatcaggtgaacattccggtaaagtccggcacctggataccagcgggaagattccggcaggttttccaaacgtacagccaacgtgttcttctcgcccggcttcagatatttcgtgatatcgaagtggaaggagttgtaaccatacggccaataaccgaccttttgtccattgatatagacattggcatggctcatcgccccgtcaaacaggatcgttgcccgcttgcctgcctgaaactgcggaacgtcgaactcggtgcgataccaacccacaccgacaaacggcaacccgccagtacgtcctgcatgctccatcgcttccttctggccgtcctgcgagatagcgacctcctgtttgtcgttcagggaactgaaagggccgtagatcgcccaatcatgggggacagtcacggactgccacttactgtcatcgaaagctggctttataaactcattgttgtcttcgcgagtgaacttccagtttttttccaacagaagctcactccgtccttgtgccgacaatgccgacacgcacccaaacaagcctaccaaagctgcaaaatagattcttttcattcgtattaattgttttttgtagtacttagcgcaacaaaaataattaaatttgcaacctttacaaactaaatctgcattttacaagacatgttgttacaattactattcgttttaattgcaattatcatcggagcccgtctcggcggtatcggtttaggagtattaggtggcttaggactggccatcctcactttcgtattcggcttggaaccgacttcccctcccatcgatgtaatgctgatgatcgttgccgtcatcgccgctgccagttgcatgcaggcagccggcggactggacctgatggtgaagtgggcggaaaaattgctgcgcaagaatccctccaagattacgcttctaagcccgttggttacttatatcttcacatttattgcgggaacgggacatgtggcttattcggtccttcccgtgatagcggaagtggcaacggaaacaaagatacgtcccgaacggccgttggggattgctgtgatcgcgtctcagcaggcaattacggccagcccgatctcggcggcaaccgtagcattgctcagtatgttgtcgggacataatatatcattgatggacattctgatgatctccgttccctgcacgttgatcggtgtcctggcaggagcattctgctcgctacatgtcggaaaggaactggcggaagaccccgaatacttgcgccgtgtcgcaaacgaggagttcacaagtgataaatataaggcgaaaggagtcgaaaaccatcatgcagccctcctgtcggtgattatattcatagcagcgacaatcggtatcgtcctgttcggctcgatgacagaactgcgcccttggttcagcctgcccgatggcagtctccgacaaatgcagatggcgcatatcatcgagattctgatgctctcggctgccgcccttatcctgctcgtcacccggacagacgggataaaagccgtacaaggttccgttttctccgccggtatgcaagcggtcgtcgcgattttcggtatcgcctggatgggtgatacctttatcggtgggaacatggcggaactgaaaggctcgatcgaacatatcgtaacagaaatgccatggcttttcggtctggccctgttcgtgatgtccatacttttgttcagccaggcagcaaccatccgtgccatgttgccgttaggaatcgccctcggaatctctccttatatgctaatcgcccttttcccggcagtcaatggctacttcttcattcccaactatccgaccgtggtcgccgccatcaacttcgaccgtaccggaacgacgcatatcggcaaatatgtcctgaaccattcgttcatgatgccgggactggtcgccaccggagtgtcggtggcgttgggactgttgatgatccagttgttttaatgtagagatcttttgttacttccaagcgatatcaaacatcaaaggttatgacaaaagtacttcccttgccgacttcgctgtccacacgaatcgtgccgccatgggcttcgacaaagtctttactgatggcaagaccgaggccgcttccctgtactttcgtgccgggaacgcggaaataacggtcaaagatactctgatggtaacgcgggtcaattcctttcccaaagtcctgcacgaatatttccactttcttgtccacctgatgcgcaccgataacgatacggccattctccggcgtatagtggatggcgttggaaaggaggttcgtgagtacccaggcgatcttctcactgtctacaaagagcttggatattttttcaggatactccacttcgatatggcaattgaagcgctccgcctgcacacggttcgccttgattgcataatcgatcagttcaatcggcttcgtgatcttcggattcagttgcaacttgcctgcctccacctgtgtcattttcaacaattcaccggtaatttcgagcaggcggtcgctgctttctcgaatacttccggcaagcgcgatctgctcatcgttcatatctcctatacgtttatcctccagcaatttgagactcataagaatagcagagatcggggttttcaattcatgggagatagtagagataaaagtcgtcttggcagagtctaactctttgaactcggtaatatttttcaggaggatcacatcgcccgcatactctgtctcacgtccatcgccatccatcacatggatcgggatatatttggcctgaaaatagctttccttatcatctgcatagatctttaagggctcctttttcttgtcgtgctgtatcagttcgcgtaccagccggcgcagcaagtcgtttttcaacgccagttcggtagcagactttcccatcacgttctcacgtttcagattcaggatggtgagcgcctcatcattagcaaaaagaatggaacggtcccgatcgagcccgattatcggttcagtgatgctgttgacaatcgcttcaatatattttttggcctggataatgtcagccaacgtgctcttcctgtattccgtcaagcgttccgccatccggttgaacgaggaggcaacttcggcaaactcctggttatcgcccaagtcgagtctcttttcgtaattgtggttggcaatctccaagatcccgtcggtcagtttacggatcggcgacgtaatggaacggggcaagcggatcaggaaagcaaaagcaatcaggacacaagccaccgcgataatgcaaatccataacaatgcttggtccgccgtacgctcggctaccttgcttttccggtagatcgtcgccatattcagactcatgatatcgttgagtgccatcctgacacgctgtatagtcgtatcgttcaggtcccggtgcatcgcctcgtattgtgcgaccagatgcgccgtcgccacattctcgtcgatctccgtgatattcttctgctgcaaatccaagttcttttcaaactccgcacgtgcctgcggatcgttcttgatccgttcgagagcatccagcatccggcgagaataaagaagcgaattataattatccgccaagatattctgcgtgtcggaagacatatccgtaatattctgcacagccagcccgcccagcagaacgatcatcgtaaacaaaaggccgatcccgaaggtcagtttcgtttttattttcagtcttaagaacttatccatacgcttatgctattattatcaggtcaatattcaactgcaacaaactgtccagcaacatcctgtatcagaaaaccgacagcacccggtacgactcgtctacaccggcagtcataccgatgcagactttgaatatgcatcttccaaccggggattccaaaatgcattcgacactctcaacacaccagcgccttttcgccctaccgccaattctatttcacaatcaaaggccatattcttcgatcttcctgtagagggtcgtcaagccgatacctaacaggcgggaggtttccgtcttgttgccgttggtatacttcaataccttttgaatatgcatcttctctacgccgtcaaggtcgaagccggaatagctgctgtcggtattatcttgagggttctgtattgtgagcggcaaggtgtctgcagtcaaggtgtctccatcggagataatgaggctgcgctccacgacattgcgcagttcacggacattccctttccaaggataccgtttcaagatacggacatagtccggcgagatcgtgcggatggtctttcctatcttggaagacagtgcggaaacaaacgcctcgacatgcagaggaatgtcgtccacccgttcgcggagcggcggcaggtgaatatggaaaacagaaagcctgtaaaacaagtcctcacgaaaatgaccgtcggcaatttcttttgctaagtcacggttggtggcggctatcacacgcacattcactttgacaggtttcgtgtctccaatcttgaggaattcaccggtttcgagaatacggagcaacttggcctgaagatcgaacgccatctcaccgatctcgtcgagaaagatcgtgccgttgtccgcttcctcaaacagtcctttcgtctctttgagtgcaccggtgaaagctcccgccttatgcccgaacatctcgctttccaacaggtcgcgactgaaagaggagcagttgatagcgacaaaggctttatcactgcgggaactgtgctggtggatggactgtgcaaacacttctttgccagtcccggtctctccggtgagcaagacgggaacatccgtggcggcaaccttgcgtgccaaagaaacagcctcctctatagcaggcgaacggccgatgacagtggcaaacgaatactgtttgcctacagccttctgctggctgtaggcaacggtagccttttccatcgcctttgcaatcaagggaaggattttattgttgtcgtcacctttggtgatatagtcaaacgcaccgttcttgatagcttgtactccgtcggggatattaccgtgggccgtaagcaagatcacttccgaaaggggacgcaggcgtttcagttcagagacaagctccacaccgctcccgtctggcaggcaaacatcacagagcaccacttcgggatcgttctgttcgagctgcttgatacctactttgcagttggttgcttggaacacttcataaccttccagcccgataatacgggacaggaggcttaaaatttgcttctcatcatcgataatcaatacttttcccatcttcttattctgctatgaggaagcaaatatagcatattattcagaggtgtccattatttcccctactttcatactaccttaattatagtttaattatttgcaaatattctaaacccagtactagttatgtgtaataaatattacattcgctaaaattgtctacaaaatgaaaaaagttctattagttgcagtctccgtactgcttgtctgcacttcttgtgtaacgaaaaaaaagtatctgctagccgaaaacggacgcctggaagccattgcccggggagacgacctgcagaatcagcttgtaaactgccgtgacaacaacgacggcctcacttcacgtcttgcttcacttgaacgggataccacccgcatgggcaagaacatccgcaactatcaaagcatgctcaacaccaacatgacggagcaggaaaaattgaattcactcctgagccagaagatgaacgaactggatgaacgcgaacggacgatcaacgaactacaggatatgatcaatgcacagactgaacgggtacagaacttgctcaacagtgtaaaggatgccctcctgggtttcagtagcgacgaactgaccgtccgcgaaaaagacggaaaagtctacgttgccatgtcagacaaacttcttttcgaatcgggaagcgcccgtgtcgacaagcgtggcaaggaggctttggccaaactcgccgaagtccttaacaaacaatccgacatcgacgtttatatcgaagggcacaccgatagcaagccgatcaacaccgcccagtttaaagacaactgggatctcagtgtcatccgcgccacttcggtcgtccgcatcctgacaaaggactacggtgtcaaacctttgcagatacaaccttgcggccgcggcgaattcatgcctgttgccgacaatgagacagccgacggccgtgctaaaaaccgccgtaccgaaatcatcatggctccgaagctggataagttatatcaaatgttgaaccaatagcactcataggaaggcagctaccgcgatttgtccgttacctttgtttctttcaaaagtaacggacaaatttaacaaaaagcaagcaagttttctcgtgaaaacccttattccagcaggattccgacccccatctgcacggtatcgagacccaggtatcagaggaaccgagatccgggtctcaaaaagaatagataggtagttacttaaaaataagctatatgctttgataaaaaatgtgcttgtctttatgataatatgatagtggaaaaacaaccatcatgcctcctatcattttttgtacaccttaatattcaatcggcagaaggcaaagtatgatagtatgacagtataaatagagattttttttatgttatttcttcttgcaccgcaaagcaaaatacaggatatacaggaaagacaacaacggaatcacaaacccaatcgccatgttatcggccccgatatatcccatcagcattggggcaaaggctccgcctgctactcccataacgatataggatgatgctttctttgtagaagaacccataccttccaggccgagtgcaaagattgtcgggaacataatggacatgaagaaaaaagaaagatagagcgcatacaaagaaaccgtaccgacagacacgacgaccaacgccatacagacagcatccgccaaagcgaaccatgtcaggagacgggccggagacatccacttcatcgtaaaactgccggacagacggccgatcataaacaaagccattcctccgaaagccaagatacgcgaagcctcaatattcgtcatcgaagtatcgacttccgtcacataattaatgaagaaactgaaaattcccgtctgggcagcacaatagcaaaactgtgcaataatagcccggacaaactgcggatgtctccacatggaggcagtaccggatgcgggtacatattctttttcttccgcatccgtatcttcttccacctgtacttcgggtagtttggtaaagatgaaaagaatggctaccagtaaaacaaccgagccaaccaggatatatggtttcatcagcgtaaacggatcgctctcctcgccaccgaatatcagcatgccaccgaccagcgggcctaatatccaacctaacccgttaaacgattgagacaaattcaggcgttgcgcccccgattcctccggccctaaaatcgtggaataagggttggctgccgtttccagaatacaaagcccacaggcaatcacaaaaagggcgatcaggaatggagatgccgaatgcaaataagccgcaggaataaaagcgaacgcaccaacagcaaacaggcataaccctaaaataatccctttcttatacccgaaccgcttcatgaacataccggcagggagcgccatcaggaaataagcgatataagtggagaactgcacaaggccgctctccgccttcgtcatcgtaaagacaccttgaaaatgcttattcaatacgtccaacagaccatgagcaaaaccccacaacaagaacaggctggtgatcaatataaacgggacaagataagacttccctccgggagcggaaaacaaagttttctgattattctttttcatgcttgctatttattacgagtcggcaaagatactctttttttcagataataccctcctcccatataagagaccgtataagccgaatccggcgaactgcggtagacagaaatctcgccgaacacatacagagccgaatccagatccagccggagaatatccggatataaatcatccgggatcgaatcggacggagccaacccaaccttctccatctggcggaaaagcaaagaatctctttctgcttcaaaaagaattagtgagtttttatcgcataaatagaaggtgtccatctgtatcatgctgtttatcgggccttcgtcatagcagccgacagcctggagcgtttcatatcccgtaatatccaaaggtgaataatcggtaatggttacatattcataataattgcccggatttgccggaatcggataattgtcgcgcttttcctgcgagatccgttctatgtccctcgctgttatgcacggtatatacgtgacaaaggacaacaaaacgacggcaagcacaaccgcatacaaataatgtgcggtccgtcggaaaaagaacagcaggacagtccccgtcaggatagcgcctaccaccaccagatacacccgcgcttccgtatatccgtactggttgatccggtagaaagttcccacccaatacatgaccaacgccggaagtacagcccaaccggaatagcggtaaaaccaatcataatatcttctctccaggaacggctggcaacttttcagaatgaatgtagccgaaataaaactaacgacaatataagcaaccgcacctttgggcaaggaccacaaaacggccactttgacaaaatagagatacaagataaccgcatatatcagcaaggccggcgaaaggacgtaattcagcaatacatcgaacagtttgttcacgccttcctcctcctctttctcccggttaaacaaaaggaacaacaacggcaatatccctgcaaatgcgatactggacgaataggccataaaccgccgttccccatattgccatatctcaaaaatatactggatcgaataatagatggagatagaaagcagccaggcaatcccggccagcaatccggcagaaagcatcgcccgaaggtaacaaagccctttcctgacaaacctatcgttatcccgtctccagtcgcacaccagatacagcagttgcactactacgagcgtcacccaatagaaaacagaccagagatctttctccttccagaaaaacggaataaagaacaacacagacagataataggcaaaacgccagcgcgatccttccgtcatcgaattcaatgtacaggtaatcaggaataagaccgggaagtaataaacgacaacagccagtcttgcccaagatgtttcatacagcgcgcaaccgaaacagcaaaataaaacagacagaactacctctgccggattgtgctgcactgctatctgtaaacgtttgagaagagcctctattttctttttcataccttcaatatttataattaaaccataaagataagcgttattgcttttctgccactatttacatgccaaaatggttccttttctgccaaattttcctacaggcactctccattaacaatcccattttcaaacacatatatccatacgagtaagcctgtttacctaaaatcatggcctccggaaaggattttcaacttcgtttatcatcctttattcatattaacgccggacatattgttctggcatgtcttttgaagttgatatagtgctttcgggttagaagaaacgagagcggaaaagaatataaatgtttaactaaataattggaggactgtattatgacaccgatgagaagaagtcaaaattggttaccgtatgtattcaatgatttatttgacaacgactggatgattaaagcgaactctacagctcccgccatcaacgtgattgaatcggaaaaggactatcgggtagaagttgctgctcctggtatgacaaaagacgatttcaacatccgcatcgacgagaacgacaatctggtcgtatcgatggagaaaaaagaagaaaagaatgaagacaaaaaagaaggacgctatctgagacgcgaattctcctatagcaaattccagcagacaatggttcttcccgaaaacgcagagaaagaaaagatcgaagcaaaagtcgagaatggcgtgttgaacatcatcatcccgaaaatgagcgaggaagcagccaagaaagctgaaaagattatcgaaatcaaataatctgttgtctcatataaactaaaggctataatggtttgttttattggaaaaatattatccggttaaagcaaaccattatctttttatctatatctttgcctatataaacattgtatcgtattataaatctaattgaaagaaaggaaataaaattatgattttaagcaagaaattatccgaagcatttaacgcacaagttaatgcagaaatgtggtcatccaacttgtatctgtccatgtccgtgcacttccagaaactgggattaaacggtttcgcccactggatgaaaaagcaagcagaagaagaaatggagcatgcccacaaaatgatcgacttcactatcgaccgcggcggtgatatcacaatcgggcagatcaatgtcgttcctactgcatggggcagcgtcacagaattattcgaacatgtttacaaacacgaatgctacgtttccgaactgatcgacaaaatggtcgatatcgcagaagaagataaagaccatgcatcaagagacttcctctttgggttcgttcgcgagcaggttgaagaagaatctacagctaaagaaatcgtagaacagttgaagaactatggcgaatgccatgttggtatccttgaccacagattgggcaaaagataaaaacaatggacaattgacaattgacaattagttgacacattcttattaattgtcaattgtcaattgccccaagtatcgctttcccccacagctctcccaaagcagaagcccctttccggttaggatgtagatagaaagttcctgcatttcccttttcagggaagagttcgtttttataatgcgtcttgaaataatcgaaaccatccgtatctcccataaagacctgtccgggaaaatgtttggaataatcgagaaccaacgcctgtaattcaggataataactttgcagacgattcaatccctcttccaggtatttggctccgttgtatgtattcgggctgtaccataccggccggtgtaatacgatcttgcattccggatagagtgccagcaacttatcgataatcgttttcatattttcataatacttggcaggcgaggccggagctccgttcggtcctgtaatagcgctgtcgttcgtcccaagcataatagaaaagatcaaagtcgcccaagtttcatctttgaactggtcggcgacccggaccaccttcgggaatagcaaatcggtttgaggcagaaaatcaaaagtcgtacttccacttaccccctggttggaatagcggacagttccgacagacggctgcctgcgcagatacaaagcggccttcacagggggagcctcatgtctcggattttccaacaaagcgccttgcgttatgctgtttccgataaatactatattcagatttttcttttcctcgcccgtcatataacaacagattgtcatacacaacaataaacctataactttccggatatccttcataattcaatttttctacttttctgcgaatgtaggaaaaaattcattcacttccggatgttccgataaccaaattttagctccctcttcctcgtgcatcggataagcctccaccaaatccatcaattcgctcaattggtcattatcgagagaaaagttccggaaaaaagcggctgcatacggatctttgtcagaaaagcctttggttgccataatctgaatctgttcggcatcgccgtactgtttttgcggatcatctagaaatttaaggtcgtagcgggagaacatccagtggggagtccagccggttaccacgatccactctttgttctcaatcgatttctggagaaatgcgaccattgtcgcaccgctcgaaggttttaacgtcagctcgaccggatattcccggatgacacgctcagtctcattcatcaagccggccccgacatcgataccgattatctcgttgcggaacttctctttatgctcattcaattcttctatggaacggatcgtgacatacgaagggactaccagccccatcctggcatctttataggctactcctaacgcttccaagttatcgccatatttccttatataatcggcatgtgtagctggaagccatgcatccataaaaacatcgactttaccggccgccatcgagacaaagaccggtgcaatatccgcatttcgcagcatcacatcataccccttgctctcaagcatgactttcgccagatagctcatggctatgccttccgaccagtttacataaccgatcgaaacctgtttcctgccattcgaggaatcgctgcaatcagcgaacatcatcatgaaggctacaataagggataaatttataatgataatcaatcttctcataaatacttttctttttatctgttttactttctacggacaaagccctgtgtaatacgatccaaaacgatcgctagaatcacgacggctatgccgccttcaaaaccaagtccgattttcatttgtgtgattcctttcaatacgatctcacctaatccgccagccgagatcatggccgcaatcacaaccatagagagagccatcatgattgtctggttcactcctgccataatggtaggtaaagccaacgggagctgtactttaaaaagaagttgtcccgaagtggccccgaacgaacgggtcgcctctacaatatcttccggaacctgacggattcccaagtcggtaagacggacaaccggaggcatggcgaatatcacggtggcaaaagcacccggaacaggtcctagtccgaaaaacaggacagccggaatcaaatagacaaaagcgggcatcgtctgcatcagatccaaaaccggacggatcaccttagccgccttatcgtttcgcccggtccagattcccagcgggacaccgaacaacaaggcgatgatcgtcgacgacaagacaagcgccacagtctgcatggtctgtacccaaaaccccatcccccaaatcaaaagtaaaccgagcaaggtcaggacagcagttccctttccggctttccaccaagccaaagctgctattcccgcaatcatcaggtagaacgggacccacatcagtattccctggaagccgtcgataaagccgcctacgatgtggttgattacatcaaaaaggccagcaaagttttctgtcagccaattaatggccatttctatatattttccgatatttatcataaatctattgcgttttgaatgatttcttctatttctttctgatcttttccggtcatctcgataatgatggctgaagtcgatacgacacctttcaaacggttattctcatcgaccaccggcaaagcctgctggactttcggcaagaggggcaacatatcttcgactgtcatactctccaatacggaagggacctctttcataacaatcgaactgatatcccgcaccccttccttacgcaaccgcagcacatctttcaaccgtatttcaccaaggaactgctcgtccgttccgatcacgggcaacgcatacaaacgtttttccctcatcttgcggattatggcctccggaccatctttgcggatacggacaacgatcggttgagtcagcatgatggaagaggccgtaacgacacgcccacgatccacactctcggtaaaacgggtgacatagtcgttcgccggatcggtcaatatctcttcgggcgtcccgacctgtacgacttcgccatccttcataatggcaatacggtcgcctaatttgatggcctcgtccagatcatgtgtgataaagacaatggtacgtttcatcttctcctgcaagtccagcaactcgtcctgcatctgttcgcggataagcgggtcaagggcagaaaaagcctcgtccatcaacaggacttccgggtcgttcgccaaagcacgtgccagtccgacgcgctgctgcatacctccggagagttcgtccacacgctggttctcatatcctttcaatcctacaacggctatgctttcatatgctttcttttcgcgctcttctttaggcactccctgcaattcaagcccgaaagctatattgctcaatacagtccggtgaggcaacaggccaaaatgctggaataccatcgccatctccttacggcgtatttgcaacagttccttatccgacagagatgtgatgttcctaccgctcagccatatctcccccatagagggttcgttcagccggttaatgcaacgcaccaacgtcgacttaccactaccggagagccccattatcacgaacatctctccttcctttatttccagattggcattacggacagctatggtacagcctgtttcttttaaaatttcctgtttgctcttaccttgcttaatcatctttttcgctttggccttctcaggtccgaaaagaatcgataagtcttttatttctattttcgtcatattttaaaaattatatttggtcatgtttagaagtaattcccaggaccgggcatgtggtgtctatttaataaacagggaaaaacgcgtttagtttaaaaaagacaataagttcggttttcactcgtctttattagtataataaatcactcataatcagacaataaaacaacaaaaccaaaagaatcaatcattcatattttcaaccaaaaggaaatgtccggaatcgcctcgcatataaaatacaaggggatttccggactaacaaggaataaatatgttctttttcgatggtattatcttgttcggctgtactcgtacagtattttcccttttccattcatcagataaaaggataacttactatcttccatgctgactacagtgaacccggcttccggattacagaacttcgtaccctcgacagtctttaccttacgggaaagtgaaccggatgtatttaccagatagtcaaccttgctgtcagcaggctggatgtgctggaagttatgaatatgaccacaaaaatacatatcgacaccatatctgtccaacagaggctccaaacgtttacgcatatcggcacgttcactttcctctttcggcgtatcggcatagacaggatgatggccgattacgatcttccatttctcagcagaagaggtaagcgttttttcgatccattgaagctgctcttccatatcctgtctgccggcatcgggatatttctccgtatcttcacggtatttgtcaatcagaggcgaagtatctataaataccaacaaggctttctcattttcacccgcctccacgacttttgagtaataacgggaagggacgatccaacgacggcttttcttgccgtaatccaataccgcttgcgtattaccgcgatactcatggttcccgttgacggcaaaccactccagcatcagctcaggatggctgtaaacaagctcgtagtttgtcatccacaacggatcgtcgacgctggctactccctcgaaatgatgagtatccccggccgcgacaataaattcgatgtctatcttttccgccaggtttcccatcaactcggcaatcgtcttttgttcataataaccgttccgtcccaagtcgctgaccagataaaaatttttgctttcttccgatacggccggaacgtcgaatgcctcccctgctaaagcaggaccggcaatatccgtttccgaattcgacgcatctttctgcttaccggcagaagtgcagcccccaaaagcggagactgcgaacaaagccgataaggtctgtaaataatttcttctattcatcatgttcttttattttaaaccgaaagctccgaattgtgctttcaccgccggcgaatggtaaatgacaccatttacggaaagcccgtttgtcgaaaagtagggaactaagttggcatctgttccgctattagcgcctaccaataccggagaaccggatttgacatggaaatcccatccttcatcatatacatattcggtcaaagcgacttcgttaacggcaaagttttcgaacagcgggtccttcaaatcattttcagtagcgataatgctatgcacatccactactccggagttgtaattcttatgttcgtagttataaccggcccatgcataggcgacaccgctttcctcttcatatacaatatcacttttctggctaccggaagcataaaaattataatcgatcacagactggtcgctataaccctcttccgggtcgttcgggttcttgaagctcggagtcatggcacggaacttgcaatttaccatcaagttgttgaaaacattcgccaacacattcttttcagcatatacacaaccacccttctcaccgtcgcgacgccaaccggcattgacgattgtattattgtaggcctgaaccttagcctggccgcgcgtttcgctctggcctgaactggacagtttcaatccgttagtgttcgggctgaacatgatattaccggcgacatccaccgtgcatccggcttttacattgatagcttccgccccgtcatatccgttggcggcaaacgtattgccagctatgattgcctgtccgcccatcaaataaataccgtcagaccagccattacgaagaacagaattagtgatgacatatttccccttgatattgttagtcgtgatctgcggataagcgtcgtcaccggccgtatatacaccgttggccgcagccggagaaccttccaccacttggccacccgtatattcgataacggtatggtcgatcaacatttcctcgcaactgttcgaagcgacgataccaccccataagccggcaaacgtattctctttcgtgcgattttcctcagctacggagaaaaggaccggattttcagctgttcccttacagtaaagattgccgtctaccgtaaattcaacagggacatggttggctccgacacctttgtcatcaaagataacctgcacaccttcctctattgtcagggatttaccggccggtactgtgatatggcctgataccaatatgatggaattggctttccaagtcccctcgacatccccctccacagtctccgtatcttcatttccaccctgattattatccggattaacaggatcatcgtcaccacaagcagccaaagtcatgaccatcatggctgcactcactaataatgcattgaatttcataaaataaatgcttaatgtaaatattaatataattgctatgttaaagtttataccggatgccgagcataaatgactgaccgtgccattctttccgttcgatcacattcccattatgccggtctgaatccacactctccgtacgcggtcctttctgaatgtagcgcaagagcgggatatccaacaggttggaggccttgccaaagatactgatgccgttcttgaaacttttttctatcgaagcatccagctgggcgtagccgtcctcccatatatcatcttcataccagttcgaaatgtcgctcagacgttttcccgtatagctggcagacacctggccctcccagccgtgcctggtctctttgaaaagcagggagagatttgccacatgggccgcctgtccgaacagtggacgggactggcgcaccgacttcacttccgatccttccatgatacgcttgtctgtcgtgaccttcgaatgtgtataggtatagtttgccttaataccgaaccagttgaagtatttcatcacatcgacttccatccccagattcttggcgtcaccgaagttcatcggtttataataggtatcctggccttcgttcaacaaaccgtattcgatcgggtcctggatattcttatagaacaggccgaccataaactgctcggaagactttggaaaaaattcataacgtaaatcgatattgtcggcaaccgtatgcttcaagtccggatttcccttttccttataatcttcattaatgatgctgtaaggcacgatctcgaaaaagctcggacgattgatggcacgcgcatacgagaaacgcaggttggcatttcgatggataccgtatttggcatggaaactcggcaatacatccgtatagtcctggtttccttccggatcaacatcacggggaaatttcagtacatatccctgattcgtatgctcgacacgcaccccggcgatcaattcccattccttcaaggtatacttcaccattccatatccggcaccgatcttttccgttgcatcgtaattcagagggtcccctatgttgccataaggacgggggacgaattgtatctcgtcaaaattaaaccagtccttattgatatattgcggattcttggaaccggtagccgagttgaacgtatattcattaaagaaactgtcacgcttcttatcccggtacatacctccggccgagaaatccaggatcgccccgccatccaatttcaacttatatgccagatcgacatatccggctttgtccttatccgagttatgttcccaacgacgtttggccgcatccgtagtagacacatgggaacccaacagatatatttccgcattatcgggcgtttcgctgaatgctttggacaagacagccgaccagttcaaccgcaacgctccgccagacagaaacaaatgttcgccttttaaggtcgaattgatgatatactggtggttccaacgcatacggacagcccgttccttttcatcttccccatcgcgcacttcggcttcgctcatatccatataaccgttataccaagtcagcttatggttgtcgttcaaggagtaatccagtttggcatgcacaccgatacgtgtctgttccgatgaataattacggtattctatcccgttatggctcgttcccggttgataatagagccgactttcctttccccggctggtactcagaaaactccccgccaacatgacgcccaatttatcatcaaaaaagcggtcgccatacgaaagtccggcagtcaggtccggcagcggtttcttccatttcatccgtaggttcgaagtcgtaaagtcttccatcgtcactttgtaatcttccggtttccccaacgcttcgtaaggagatttctttacgataccgccccggttgaacgattggaagtcacgaccgaaatacatcgcgttataaccggtagacaagttggccgtaaattggcgttcggaaggagcatctttcatgatcagattgacagcgccaccaatgccgtctccctccatattcgccgtcaaggatttggtcacctccagacggtccagcatctcggaggggaagatatcaagcggcacaaagcggttcttattatcgggactcggaatcttcacaccgttcaccaacgtatagttataccgtttgtccataccccgtaaaatggcatactgaccttctccgctactgttacgctcaaccgtcacgccggacatacgctggatcacattggcaaccgtaatatccggtgacagctcgatcgctttcgcactcatgacgttgaccacattcatcgcctgcttctcaatcccgcgggcaccggcttcggtacgtcccggattggcggctatgatcgtgacaccttccaggttcatggccgaaggcttcatgttaaacagtacatcccggccggacagcgtgtttacgttctgttcctgtgtctcatagctgatataactgcaaaccaacgtgatgttttttccttccggcacatctttcaggacgaatgtcccgtccagcccggctgtcgttcccatcgccggattttctttcacatacacagcagcaccgatcagttcttcgccggtctgcgcatccttaacccaacctttaactgtcgcagcggtcagataagcagccggagtcaaagtcagaaataaaacgagtagtaattgcttcattatttgtttttcttttccgccgcaaaagtagaaggtgcggataacagcaacacttcattctttttacaattacgttacaggcagaaaacagaaggaacaaaaaagctacatatttaaacgatatcgaccggttaatctacaaaaagtcttatatttgcgagtaagaattacacataataacgcatactaatatgaaaacaaagatttcacttttacttcttgccattctatgcaacatctccgtatttgcccagagtgacttcgacaaatatttcgaaaagaaaagtctccgggtggattttgccttgagcggtaatctaaagtcacaatcggctgctatccaagggttgcgtgaagaaccggtatggggaggtccggtcaagaacctgatcgataagttcaattacggaggttattatattaatgtctatgacaaagctacgaataagctgatttactcacgcggcttcaatacgttgttcgaagaatggcgctcgacagaacaggccaagacagaaacacaatcgtggacaaacagcgcttccgttcctttcccgaaagtacctgtctatgtcgagatcacggcacgcgacaaggccgacatgcaattccatccgttgctgaaacaagagatcgatcccaaaagtatcttcatcgaccggggaaaactgaaagccaataaagtgcatcagatacagaaaagcggcgattcgacagaaaaagtggaccttgttttcattgctgaaggatacacggcggatgaacaggagaaattcgtagcagatgcaaacaggtttacagaagccttgttcgcgactcctcctttcacgacacgtcgaaacgacttcaacgtatgggcagtctgcctggtatcggaagaatcgggcacggatgtttcgggtaaaggtatcttcaagaacactgccctcaattccggttattatacattcggtgtagaccgttatctgacaacaccggatatgaaatcgatccgcgatgccgtctggaacgttccatgtgatgcaatattcctgctgataaacacagatatgtacggcggtggcggcatgtacaacttctatgcctgcgggacagccgacaacccacggacacctgtcgtctttacacatgagttcggacatagcttcgccggcctggcagacgaatatttttcttcggaagtcgcctaccaggatttctataacctgaaatacgaaccgtgggaaccgaatatcacaactttagtcgatttcggcagcaaatggaaagacttattgcccgcagacactcctattcctaccccactcgatgccggacataaggacaaagccggcgtgttcgaaggaggcggttacctgtcgaaaggcatttatcgcccgatggatcactgtatgatgcgcgactacgccccattctgtccggcttgctcacgagccattcttcagatggtcgatttcttgacagacaagtaataaaatctataggcgcccagcaaaccgtaacccatagctttagcctctgtaaagctatgggttacggatgccaaagcgtagctttatggtggtcttttctcgtgtcgaatgtcttttcgaacgggagtgttgaaaaacgccatgattgattatctgtcatctttcaccgagaagacgaagtgtctgcttcgggaaaattcattataagatataattattttaaccgtaccgcttccccatatttgctaatatcgatcaatttataagtatctaccttgattttaccgcgaatgagttcgggaatattgaaagagaagagagaacgttcataatagtccgtctctttctgaggcaacaggaaaggtttgccgggaacaccatttgcacccagataacaaatgtaaggccgtgtatacagcccgtcatcccgacgactgctgaaaacgaaccaccggctgttgctgctccaggaatgatagctttcgacatcgttgctgttcacttggagaagggaatctgttttacctgtcaacatgtccaatagtcgcaaatccgcatccttgtgccagatcgagaagttgccatagtccgaaaccgtgtacatcagaaaacggccatcgggagatactctcggcagcttcgcgctccgtccttcctcattagcgttgtaaagcgtatctatcgtctggccgaaactccgtttttccggatcgaaagctatgctttgcaggttgtagcggattttccgatatgactcaggcatccggcacgccggtgcggaacagaaatacaaccgtctgccatccgaagagaatgccggaaaagtctccatattctcctccgaagataaatggggagctgttacgatttcatgtttctccacatcatagaccacgacatccgatcgattgtcgaacacttccacccggttcgcatccgaaaggtgaaaatcctgtttcgtatcgtttgtcgagaatgcaacatatcgcccggacggatgccaggcgggatagaccaaagcggaaatagtccgttcggtcttcgtatccagcttctcgatatcaccatccgtcagtatgtaggtcccggcatgtagcgcacgttggtggaaaagcatccgatccggattctgcatacagaaggaatggcagttcatacaattattattcgtctgcttattgtcgagaaaggtttcttccgtaaaatcctccaggcaacgctggtaaatccccatcctgttccacatccggtagcctggtgcgatacggcgatagaccaaatagggatcgattttatctttgattacttgaatggaaaaaggaggatatcgaaaccatctgtcatctttgcatatatagatcccgaccgtaaggttccctccaaccgatgcgtccaacagccgacgccacttcttctccgggatttggaaagaaccgttatccgaattcacccgtatttgctgatctttgccggagaatagggcgattgcttcgcaaggttctttcagtttgaagttcagcggagcgatattacaagggaccgcgacccctttataatcgggaaagatttctatttcaccttccgtttcctccgcatcgggcaatccaccattgcaagagaaaaagaaaaccgtacaaagccacaacagagaatataaatacttcatagactatccattcaaattcttacaataataataaaaccaaaaagtgtctccatattgccggtaaagccaagaaagtccgtcactactattcttgatcttcagaatatctttctggaattgtttatagcgttgcactatctcaggccggatggaaacccagtcaaggacagaaaggtcctcagtcgccaaaaccaatgccgcctcctgaaaatgaacaggaagggactgtcccggcaaaaatctaccggcatgggacaggaatatcttgaacttctccatttccttcgccaacagataggaacaacctaaatattcccatgcaacccggtttacgcctggttccgaaagatgtccaacccaaaggctgtcgatgccggtcaggcaaagcaaattgtccggctgaaagaccggtattgtctttgcggcaagctctccatcctgcccgatcttttcgggatgacgaatataaccggcatatttttccgcccaacgccgatatcccggcaaccggccgagtatacccagatacttatccgccaaagcaaaatctctccgtatcaagctaatcttgaccaaccgttgaagcaagcggggacttcctcctcgcttggcaagtgtcaatccttccatcgcatatccttccgaaaggctgatatccccgatcatataatggatatcactcaacaggcaactcatataataagtccggtcccaagaagccaaaaggctttgcggtcctttctggtcataacggaacaaccgatcgcccaaaaggcctttttgagccaatgccatattcaaatagtttaggctgacataatccgtctcctccttctccggatgttcacggataatcgtgtcccagtcattcctttgctcccaaacggataactcgttcatccggttgttccggacttcatacggtccgggcagacaaaatgcggaaaagcaaaacaggacgaccaacaagcttcccgcaacaaatactttcaccgaacgctttcctttgggaagaaccttcatcgtataagccgttgcaaacagaatcagaaacaagacgacaaaacggatccagataaaatagacataagaatccggctgcaactgggactcctgatacctttccgaataaatcccgtctgtcaacggaataccgatagccaaacgaataccgatataagccaacaacaccccagccaaaaacacagcaagcgaaccagaccatttcctccttcggcacaaaagactcatgcaaaccacgaccagaccgtaaagtgccgccaactggccagtcaaaccatagataagaaacacactcaccacaccataaaacaactgcaccttcattctccgtatacggataaaaacataagagaatagcagaagcaggatcagcccgaccgtcccgtccaacacgtaaaaagagctcgtatgggccttcagcaatcctaaaacaggaaacaaggcaagcaacaaattatatccgcgcggtgcgatttcctgcaaaagcagataacacaagaaaccggccacacataagaaaatactgttaacacacaagacaaacagggaagcagtataatattgaaccaaagcctgcccgaccaccgtacaaaagccaccggggacagacagcatatcccggataaccacccattcgggaataaacaactgcacctcttcctgccgttggaacgtggaagtcccgaacgaccaaaagaaaaaccaaagtccgataaatacgaacagccaaaatacaagcgtcctcccagtcataatcccatcgttttcgttaaaaggaaatgaaacaaaagaagagaggaagtcgccttttgacgactgttcctctctcccccggtctaaagagtaaaattataccttatagtctttcacattctacttactgccgtaacccgggttctgttccagcaggttattagcaccgatcagactgtaatggatcgggaaacgattcaggttcggattgttcgtcgccttatgatcccaccagtcttccgtcacataggcatcccaacggatcaagtccgtacggcggcgcccttcggccaagaattccaattgccattcgtccagcatacggtatttgtccagattagcagccgttacaggatcgggatcgactccgtcttcgaaataacgcttgcggactgtattgatcagatcggcagccccctgtttgtcaccggcacgcatcttgcattcggccagcatataatagatctcggccaaacggatcacaggtacgtccggatcgcctttccgcttgaactcttcctgagtcggacgcggactgcgtttcgtcacacgtaccccggagttttcttctgccgtcgcaaccgtcgaaggtaacgaagccacatccggataaagcggatcttttcctaccttggcaaaatgagcgatctggtcgacaaccgtgatcacctctccggcatactcgcgcgtacctgtgcaaacccattccggattcaacggattcaccaattcgccaacgataaacataccgcgatatttgccattgccttcatatacataaggttgcttacggatatccttatcattgaacttcgcatacgctccacccagcttatatggataacgcttacccgtaggatcgagactcggcaccagtccgagagcattgtccgaaccggaaccttccagtccacccagatagttcttatagttgtaaggaaccatcatgccccaatacatggcatccgtctcggtctttgcattctggctgggtacggaccagatcagctcaggacaacgttcgttgtcaaatccgaatatgttcgtccaatccgtttccaatgcatactgtccgtacttaccgtcgataatgtcctggcagatctgggcggcttcggtaaacatctccttgccgatataagatttggcattgaaatacaaacgggcctgcaaggctgcaccggctgcacgatggatcgaaccggtttccatccctcccagctcttccttgatcggaagattcggaacggctattttcaacaaggaatcgatgaagttaaatgtctcgacatccgtcgaacgtcctttcacttcgctctgtgtcgtcgtgtacaaaggcacccctccgaagaagtccaaaccgtccaaatagaaggaagccgccagcgtacgttgctggttcaacatggattcgcgcgtaccctcttcaaagcccaatgcatcgaaatcgacattttccaaatcttccaatgcatcccaagccaaagcgactcccatcgcaaagttggtccagcccgtctcgacacgcgtcatgtcttccgtatactcatgatgatggaatttctgatagacggccccgtcataccagtcgctaccacgcgtaggcagacagaactcgtccgtccccagttcctgcaacaaccaacgcggactgtcgtgggcaatgtaccagcgccagtgagtaaacggacggttgaaacgttgccatacggcatcttgtgagctataaaaagtctccgggaccacctgcgaataaaaatcaggttcgacactacaggaagtagtgcatagcaggcagatcactccggataaaaacaattggaatatatttttctttttcatcttacaatcttgtattagaagttaaactgcatacctaatgtccaagtacggacgaccggataaaaatcgctccagaacttttccgttcctttatcccagcccgtgatatccacctccgggttcatgccgctatagccggtgatcgtgcaaacgttacccaccgtaccataaatacgaatccggtcgatcaggttgttcgtgtacttcttcatcggaagcgtataacccagcgtgatcgcatcgattttcaggaatgtaccgtcttccaggaaatagtcgcaaatctgcttttcgcccttgatgtggttgaacttgccgtaagcgtctttcaaaacattcaggttgccctgtccctggatgccgtaatacatattgatcgtattatacacgtcgaaatcgatccagctacgcaggttgatgcctaaatcgaagttcttataagtcaaggtatggctccacccgataatcagtttcggagtatagttgcctatatactgtttgtcgttctccgttttctgtgcagccgggatcacctcgccatccttgttatacagcaagaaactgccctcgtcatcgaaccctgcgaacttccacatatagaaagaaccgattgtcgaaccggcttccatacgggctgcatcgcccggagttcccggagccacgaaaccattaccgttatgataggagttgtcaccctccaacgtcaggatctttccggtattatggctcaggttcatgctggaagaccaagtgaaatcttttgtacgaataatgtcgccaccgacttcgaactcccaacctttactttccatactaccgatattctgcatctggctgccctgcgtataaggtggttgcgggaccttcacactgaacagaaggttatccacctcacgccgatagtagtcgaacttgccatacaagcgtccttcgaagaaagagtaatcgacacccaagttccactccttcttttcttcccatcccaaattaggattgacattttgcgatttaccgtatgagtacgcccatgttccgttcggcatcatccagttcgtgtccgagcctaacatattggccatataagtcgcactaaagtcattattaccggtcacaccgtaaccgaaacggatcttcaagtcgtccagccagtcaaagtctttcatgaactcttcgttcgagatacgccatcctgccgttgcagaccagaagttcgcccaacggttgtcggccgcaaacttggaagaaccttcatgacggatagaggcagaaagcatatatttatcctggtaggaataattggcacgggcaaagaaagagaacagacgttccgtaaccgatttgccggagctcatgccggccttgccatccgtcaggtagctgccctggcctatatcccagtacttgatgccatcgaccgagaaattatagttgtccataccgaagttttccccgttgacctcaaaataagaataaccggccgttgcattcagattatgtcctcctttaaagtcttttacataggagaaatatccttccgaagtcaggttttccgtcttgctgaaagccaggtgggcatgccccttacgcgaattgtcaatttcgcttcggtgtgtgctgggccaatattggtgcaattcccattgacggttttcatacccgacaacctgctggtaattcaaacccggaataggcttgatattcaacttcaggtttacttccggcttgaaccatttatccaatccgtagtaatcttccagcatggcatccgcaacgacgttatagtccaacgattcgttgatccacacgttatagcctgtttcgctatccggatcgtacggcgagcgggtagggttgttacgcatggcttgctgaaaattcggatagtggttgttacgggcagcctggcgataatccacggccggacggacttccagccaatcatcgaacaacttgaaagacgcgttcacacgtccgccataatcctgacgttcgtcctgcaacgcgataccctggttcttttcatagaagaaagaagtataaacctgtgccttttccgtacccatttccaatgcaagatggtgtttttgggagaagttgcccttattaatcaactcatcccaccagtttgtatcggaaccgtaatccgtaccgatattatgttcggcatattcacggccggacaacatttcgggagcattgtagttttgttttttcgtaaactcgttgctgtacgtgagtctcactttcccgttcgtatccgagccgctcttggtcgtaatcaggatcacaccggcggctgcacgtgttccgtagatagcaccggcagaagcatctttcaaaacatcgatagacttgatatcatcctgcgtcaacgaacggatatcgccaccaggaaaaccatcgatcacgataagaggagcttttcctgaattgatggaagtcataccgcgaagctggaatgtcgtaccggaattggcacttcccaagttgttcatcaccaaaccgccgatcttgccttgcaaggacgccgagatatccgccccgctcacaccgaccatcaggtcatcggccttcaacgaggtgatggcgctggtcacctgcttcttgtccaaagaaccatagccgatcaccacaacttcttccaatgctttggcatcttcaaccagcttcacatggatggttgcctggttgctgaccttcacttcctgagttgtataaccgataaaggaaatcactaaagtcgagttgttgggaacattctgcaaaacgacctttccgtccatatccgagatatttccgttcgtagttcctttcacaacaacattagctcccgctaccggtcccatttcatcctgaaccataatcgtcacggtctttcctacttgatcaggcactgcattctctatccgatccgaggttaacaattcaacattctcaccagccgcaaatactcctgtcgtcagacaaaagagcagtccgcaagtgactttcgatactcgagatattgaacctttccttcttagaggatggccacaattctgtttttgttgcattttctgtattattataaaaaggttaataataaatcgatctaagcctgaggcttatcacactctaaacaagacttaaagtctttctgtcagttttctctattcctatctcataggcctatatatttaagttgtccatataaactatttttaattaatacaggcagttaaaatgactatagtcttaatagaactccggtagccttaaattaaaaggacaatgagacggttttattttcatgtacaatttactgatgtagaaggtgttgaacgctttcgtagtatacaattctctgcccgtgatattatacaagcacataatgctggtagaaaattggtagctcttctcgtttgtgatcataccgtaaaggagatcaatgcgtattatttagaatcacttaaaattgattagtatgcctattggtgctatagttggtggtcttggctctcttgctggttctatgattggtgcaaatgcccaacgacaggctaatattcagaacatgcagttggctaaataccagaacaactggcaaaccgccgagaatgaaaaggcttatgcccgtagtgtcgaaatgtggaacatgcagaatcagtataattcaccgactgcgcaaatgtcccgtcttcggcaagctggccttaatcctaatttggtttatggtagtggtgttactggtaatagcgctggttcagctccgcaatatcaacccgcgaaaatccaacgtgctacaatggaaccctaccgcggctggaatcttggtttatctgatgctgcgtctatgtatatggcaatgcgtcaaaataaagctcaagttgaaaacatggaagctcaaaataagctcattaaagaacaagctcgaaccgaaggtattcgtcaaggcaatattgctatgtctaccgctcgttccgggtttgatcttaaccttgctcgtgagcttcgcaacgtatctattgatcgtgctatagcagagaaaaatctctccgaagcaagcgctgctggcgcttggactggtgcgaatcaaaaggtactccaatatgaattagatcgtaccctgtttgacaataagattaagctttcgaatgctcaatatgcaaccgcaatggaaggtatccgtaaacttcgacaggataatgatattaacgctttccgcaataccctggaacgtgtaactggtaaatcttctttagtagaggatttaattcgtagattaattattagtatggctccccgtgagcttgaccaaatgtttaaccccaaataatttttgttatgagacgtagacgtagaggccgtagacgtggattcctcggccgtagtagaagacgtagaatccgtggttatcgtgtaagtagaggaggtgttcgcttatgaaaccagtttggaaaattatcattgccgttttagaaacggtcattgatgctgtaaaatcgatctttgacaaacccgatacccctgcgttgaatggctaaatgccttcaccctatgtatcttgccagtgtagaagcgaaagttccttgcggttggtgtgtaaactgtcgtcagaataagcgtcaatcttgggtgtatcgcttacaagcggaagccaaagaatatccgctatcgttgttcgttactcttacttatgatgaagaacatttaccgatagaaagaattggtagtgacctatttcaaacaaatgttgccgtagtatccaaacgtgatgtacaattgtttatgaaacggcttcgaaagaaatatgaggactataaaatgcgttattttgtcacttctgaatatggtgcaaaaaatggccgccctcactatcatatgatcttattgggcttcccttttactggtaaaatggctggtgacttactggccgaatgttggcagaatggttttgtacaagctcaccctttgacaatcaaagagattgcttatgtctgtaaatacatgtacgaaaaaagtatgtgtcccgagattcttcgggatgaaaagaagtacaaaccttttatgctttgttcccgaaatcccggtattggctttggatttatgaaagctgatatcatcgaattttatcgtagacatcctcgtgattatgttcgtgcgtgggccggtcataaaatggctatgcctcgttattatgctgataagctctatgatgatgatatgaaagcctttttaaaggaaatgcgtgaagagtttttccggcataaaatgttcaatgaatggattgattattgtgctcgtgaaaattccgttcttaccgatctcatgcagcttgaacaacgcgaagagtatgaaaaaagaatgaatgaacgtttaagatgtaaaatgtaatggtaaacatatttaactcgataagaatgaaacgtcctcgtcggaatgctttcaacttatcatatgaatcaaagttaacgttgaacatgggcgaactcgtgcctatcatgtgtatgcctgttgttcccggtgataaattccgcgtgaaaactgaatccctcgtgcgtttggctcctcttgtggctcctatgatgcaccgtgtaaatgttttcactcactatttctttgtcccgaatcgtcttgtttggaatgagtgggaagattttataaccaaaggtgtagacggtgatgacgttcctgttcttccgtccttccggttgtctcccgatttggtttcgtcaaatccttcgcggttttttggtgatggtacgctttgggattatcttggcttgccttcattaaaaggcgttggcggttttgagttcccgaatcccagctcgaacggtgtaatcgctcctcagaactaccgtgtttcatctctcccgttccgtgcgtatcagcttatttataatgagtattatcgtgatcaaaatttaaccgctcccgttgatattttgttgaactccggttttgaggatacgctgcatgcattgaatcttttgcaacttcgccgtcgtgcttgggaaaaagactattttacttccgcccttccatggttgcaacgtggccccgaagttactgtgcctattcaagggtctggtgacactttagatgttaagtatgatagagatgccaagactactcaacgttggcttgattctgatctccgatcttttgaaaatggtgtagcttatgatgctgtgttttctatggaaggtaatccgcgtttatctcgtttggtcggcgttaacggtggtacaggcaaccgcgctcccgaacttgatccgaacggtacattaaaagtcaatgttgatgaaatgggtatcaacattaatgacctccgtacttcgaatgctttgcagcgttggttcgaacgtaatgcccgtggtggttctcgttatattgagcagatcttgtcgcactttggtgttcgttcatctgatgcccgcctgcaacgtccccagttcctcggtggcggtcgtatgcctatttcagtgtcggaagtactgcaaacgtcctcgactgacgaaacgtcaccacaggcaaatatggccggacatggtatctctgccggaatcaataatggttttaagcattatttcgaggaacacggatacattatcggtatcatgtctattactccgcgttccggctatcaacagggtgttccgcgtgattttacgaagtttgataacatggatttctatttcccggaatttgcccatttgtcagaacaggaaattaagaatcaagagttatttttgtcttctgatgttgattacaacggcggtacttttggatatgccccgcgttattctgaatataaatatcatcaatcggaagcacatggtgatttccgtggtaatctttcattttggcatttgaatcgtatttttgaggataaaccgaacttaaatactacatttgttgagtgtaaaccgagtaaccgtgtttttgctacgtcagagaccgaagacgataagttttgggtacaaatgtaccaggatgtcaaggcgcttcgtttgatgcctaaatatggtactcctatgttgtaagttatgtcttggtttgagttttatttagtagtaactttagtttgtttgttgttatgtttgttaccgcttataattttaataatatttcttcggaagtggttcaggaaaaagtaagtgatgaaattttggtagaaccttccgagagcttcactgttcgcgagcttatttaccgcctcgcaatgggaatgcctgtttcttccggtgttcggtccggtgattatcccgatcatgatcaagattttgatgatgtattacctacagaggacccggatttcgatttgtctgattacgccacattaacgaatgatctcgccgatcgtgaacgtcagcgtaaaatcgatatggaaaaggcgtataaggaaaagttggaaaaggaaaagactcccgaccctgctcccgaccctgctcccgaccctgctgagtaatttgtcctaaactgtccttgtcccctacccgactggtatccccagccgggtttaggcgtttgtacttgcacctgcgctgatcgcgacaactcgcgaaagcggacgtcgtcttggcatggtctttctcgcgacccaatttaaccaaagcctttacgtgaaaaattcacgtttttcaatcgatcgcgaagcgatacctatctgccgaaggcgtctataacaacgatcatagcgacaatggaaattggcaacgatagttgcctgcgatcgcgagacggtaccaatagggtagaacaaagcgtagcgacgtgataccctgaggtacccgaacgcgatcgccctcaatggagtagacctatttatacgcttataaatagaataaatagaatataaaaagtgttaacgttataaatcaatactttaccccctttttaagggggataatagggggttgtatgtacttgtgcgcgcgtaataggtaacttgattaattatgcgcgcactgacacctaaacggattttaacaaatccgtttttcagtgtggaatattttgctttgctttgttgcattaatcgtgctaccgtagtcttaatagaactacggtatttgttttcggattttatgatatggtttgaatattaacagaagcggatataggtcttacttttcatcccctcaaacgaagtttttcaaataaataagtatatctgcagtagtacattataagcagtttgagaactttccaatgtctcttcctttgaaacttttttggaaaccaatctttttatttggatatttttgtttaattttacgcccaactgaatggtattgttaaaacatatccgaggtaagagtttggtaatgtgtttttaatgaattttcaatcacaatacacggtaggtttgtaaaaataccgtagttctattaagactgtagttcttttctttccaacaagaagtttctccgattgattttttataaagggatgaaaaggcttttctgtacttctgccagcacaagtattctgataaatcaaaataacaccccgtctctatcttaccggacattttattaccgatcaaacaattaggctgacacttcaatatagcaagtccgcccttacagactctcccgcaaggcaaatcaagctacatttgcatgtattccctgctccataggcatatgttccaggtttcataagcatgtattcgagcatacataggcacatacagacagaaagataaggaccttttacaacaaaagtgccgaccttcatgcaagaaagtcggcacttttataagatccggtcccctattttgagaaaaaacattgccggaaacgttctattttgtctggaagcatttgccggacggatagttccggataatcattttgcctgctatcctcgactatttctatcacggccggcagacataagctgatcggcatcctttcagcagacaaaaagattcatatgactccattccggtggcagaacggaaatccttatctccgcgagaatacgataaacacagccgttcgatccttatcccggctacagccaatagaaaccggagcctgtttgacgttttgtcattttgacaaagatcattccatcggaacttccatcaaaagtacggtcgcatgtttcaatacctctatggcaatgctgtcggtgtcccagaaaccggcgccgtcacgtttggaaaggactgtgttggcaacctccacttcgccttcgatcacgaacaggtaaacgccgttcttcttgccatgcagtttgtattccttcaccagtcccgcatccaacgtacccatcgagaaccaggcatcctggttgatggaagccggggcggagccgtccggcgcaatcatcactcccaactcattcttcttcagaacggggcggatatcatagcttttataatgaggtgctgtattctcctcacgcgggaacacccagatctggaggaaatccagctgctcttcaccgctatcattgaactcgctatggaaaatccccgtacctgcactcatcacctggatatcgcccggagtaatcacttcgctgttccggatactgtcgccgtgacgtaaatatcctttcaacggaatagagatgacttccatattcttgtgtggatgtgtatcgaagccctctcccggagcgacagagtcgtcattcaggacccgaagcatgccaaaatgtactcgcttcgggttatagtaattggcaaaactaaaagtgtgatgggtcttcagccatccatgatttgcatacccgcgagtattggctttatccactactgttttcataaataatcctcctttgttaatttcatctatataacactccggattatggaaaagttgctgatacgggctggcaccgatgtccggatattcttggcttccccatacacgaaagagagaaaataggcaaaaacataattttctttagtctcgacaatacatgatacaagagaattgagtacttttgtaccctaataaaatcatcccgtaaatataaacactatggcagtttacttaaacgatgtatcaagaacattcggcgaatacttgcttattccaggtttaacaaccaaacaatgtgtgccaaccaacgtttcgctgaaaactccgcttgtgaaacacaaagtgggcgaaaagcctgcgatcgaactaaacattccttttgtttcagcgatcatgcaatccgtgtccggtcccaagttggccatcgaactggcccgcaacggaggactgtctttcatcttcggttcacaacctatcgacagccaagctgaaatggtccggaaagtaaagaagttcaaagccggttttgtaatcagcgactccaatctgacgcctgaaaatacgttggcagatgtaatcgctctagtacagcgcaccgaacactctacgatcggtgtgacggacgacggtactcctaacggtaaattgctgggtatggtgaccagtcgcgactatcgtgccgaaaaggattctcccgacaagaaggtgaaagaattcatgactccgttctccaaactgatcgtcggcgaactgggcatgacattgagtgaagccaaccagatcatctgggatcacaaactgaacacgttgccgatcatcgacaaggaacagaacttgcaatatttcgtcttccgcaaagactacgacagccaccgcgacaatccgaaagagttgtccggcagcgataagaaactgctcgtaggcgcggggatcaacacacgcgactatatggaacgtgttcctgcgctggttgaagcgggtgtcgatgtattgtgtatcgactcgtccgacggctattccgaatggcagcaggcaacactgcaatggatcaagaaaacgtatggtgacaaagtgctggtcggtgccggtaatgttgtcgataaggaaggtttcgactacctggtcgaagccggagccgatttcatcaaggtaggtatcggtggcggttccatctgtatcacccgtgaacagaaaggtatcggccgcggacaggctaccgcattgatcgacgtggcacaggcacgcgacgaatatatgaaaaagacaggtatctatgtgcccatttgcagcgacggcggtctggtgcatgactatcacatggttcttgctttggcgatgggtgcggacttcctgatgatgggacgttatttcgcccgcttcgacgaatctccgacgaagaagatgaagatcggtaacaatttcgtaaaggaatactggggcgaaggttcgaaccgcgccaagaactggcagcgttacgacatgggtggcagcgaagcacttaagttcgaagagggcgtcgacagctatgtgccatacgctggaaagatgaaagacaacctcaacctcacattgggcaaaataatcgccacgatgtgcagctgcggagctatcaccattcccgatttgcagaagaacgccaaaatcacattggtttcctcaaccagtatcgtggaaggcggagcgcatgacgtgatcttgaaggaacagaactaagaaacagactatttattcataaaaaagagagtatccggtttttccagatactctctttttatttaggcttacttacgaatactgtttacttgaatatagaacttaatacctcccctgtccaaggtaaaggtttctctacatcaaacaaacggaggatcgtagctgccgtattcacggtattattgggttccgtgatcttgaaccctttgcgtattccgggaccggtgatcccccagggaacaatcatctcattcgtactgactccgccatgtccgtattcaatacctccgtgatccgtcaggaacataaaatgagtgtctttatacaagccgtcccgtttcatcttttcaagaaattttccgatctcgacatccgcttcttcaatagacttgatatattccggagacatccatttatgtttatgcccggcatgatcggtatgcacggaataaaggaataccaaagtgggattaccttcattagccttcagaaaagaaaatgccttttcataattcgggacataagcatcctgttctaaatagctgacttcatccaaatacttcttgttatacggatagaacagatttatccagttataataaaaagccgtcttcatctgcggaactgcatccttaaggattttaaataccgatggataataaccatcactgtccgtatggatggcaggcagcttgaatttggatatttcccaactgttgtcaacaactccatgctgttccggaccacttcccgtcaaatggcttgtccaattgggcaaagtcaccgaaggcataaccacccgcgtatcaagcgaaagggaaccatcagccagcaaggcttccaaattcggagttcttgctttcagaaatccttccacacagataccatcgagagatatcaggactacacgcttggctttcgctttgccaaccccatccgtcatagcagcagcagaaacgggaagagatgccgaacctaaagccaacgcacctgcaagcccctgcttgaaaaatgttcttcttgaatttttcatgataattttattatacgattttcccctgaagcaagtctgaaattcttcaaccgcttctctttatctccaataaccaacttgtccaactgtaaagaacctttcaggacttcgatcgtagcagtatcatctgtaacggtacaagtaccccaggcataaccattgctccagaaataacatcccggccggtccgtgaaatgcatccgtcgatccactcctgaatattggaaatcactcaacgcgattactgctgcccaacttgccatcgaacgggcatagtgatgtccgcactccgcctcgctgaacggatttcgtttcgccccgtcatgacggtcacgaatcgcacggatgcaagtcaaggcctccttttccataccttcgtatatcatgccgacagcggcacaatattcgaaaccggtcatcacttcggcaaagtaagggaaaggaacttccagtcgtcctttcggccaggaagccatcagcagaccggactcatctcccatcacatacgaacgcatattattaaagtaacggctgaaatccttcacataattatatttcatgatacttcccaatgtcgtacggatatgctccttatctcccagatatcccaaaccgcatatatgggccatatactgtccgaccaactgatcgaccaggcaaccttttcccaattgaaacggcggaaccttcacgtccggattccgcatatccagatattcaaatgtttcgggatcggttatcttatgttcataatattccccgttaaacagattggcatccatccagatgcttccctgccggaacaaagtattgcatttcttggcaaacgtcttatccttcatggttaaagccattttctcagccgcctttaaggctcccatataccagaagcccatttgaggattcggaccgaaatagttcacatccatcgtgttatgctgcgaaccttccatgatgccgtcctgattgccatcccaacctttgtcggtccaggcataagcaagcactttctttacttgcccccaattcttttgcaggaactcatcgtctcccgacaactgccaatcccggtaaatcttcatgacacatcccatctggccgtccgccgcagccgaattacctttcgctgcttccgataaaggcaaggaagcccggaaattcatcagcccgttttctttcgtcgcatagttgaattccacatcacgcatcgtctttgccaattcaccgaaaagaaacggtgtcgccacctcgtagttccaaacatgcgtgcagctgccggcacaagaaccgaaacgatccatcacgccttcccatcccatcaaatgtccgctaggtaaacgaaagaccgtttgcgaacgcaatgttgccagattaaacaaagcagcctctttgacaacatcaggataagtcgatttcaggaaggcatgcacaaaagagagcgtctgcctttccatttccggaatctgaggtacgattgcctcggccgcttcccaggcatccgggaaccgagtgctgtaatagttcccgacaattgtttccgaccaagctttccggttcgggaaattccaagtcaggtagaaagtaaacgtttccgtactgccaggtcccactgtcttctttaccgccagcgaagccatcgggtcttcatcctcctgtctgtcccgctccgtcagttcgccatcagcactaaaatcatcccaaaagttaagaataccattattccaattatccgcccgcgaagaagtccggtaggtgaccccttctactgcctgagtggtcaaggccaccgttccataagccggatcattcttatctaccccgtccgaatataggtagaggccttgcaagccgttctttttacgaaactggtttttattgtctttcgcgcctgtcggaatgtaatctcctttccagtcagtcctgaacttactgccgtccttcccgataaaattgcgcatcgaaccacaaacggctacctccaaaggacggtcggtcgtatttgtcacctcataagccaacacggcaatcggcatgccactggcatctgcgtctcccggtaccaacggattgaatcctttgaccgtcactttcaccggcaattgccggtcggaaagatgcacttgtccgaacggataagccgcctcgaaagtagcatcggcaaaacgcggcataccgtgatggttcaccggccgcccctcataatgcaaatactcctgcggatataaaggacctgcaagcagggtagtcatagcctctcccgtctgcggttttgcataaattgcaaagaaaggtgcattattgccggtcgtcaccgtactatatttcttaccagggacattcataatctcccaatcccgcaactctccccggcctcccaaagagaccgttccagtcccgattcctcccaaaggcaatgccacctggtaaagatgttcccggtcatattgtttcaaaaccggccatgtttgcggcttccattcttgggaaaagacggctccggaaacaaacatacaaatcgttaacagctttaatctattcataactccaaaattagttcaaggcatacaatgctcaaagggctaatatacttaaatattatccatttcggccttttttaacggaaaagatatccgatatacccattattacatcggagagttataatcttgaaaggttcaaaagcttgccataaaaaagaggataagctatgttagcaaaacaaacaacaacccttattaggacgttttactgtttggattgaaaccccaagcaatccgtgtctgacatttttctcttttatacccaaattaataagcaaccagcaaaacgagcacggcaggaaatcgaaaaacaaaatccctttatgctcaaaaaacagaataacctgacattgtggaaaagctgaactcccggagaattgcctatagtaaacgaatgtgttttgttgttaatgaaacaatgttatacaataactcccttcccagatcaggataagaagggaattataacccggattttgtatcaattgcattacgatggctaaccttatgcattagccatcgtaactcatagggttagcacttgtaaagcgatgccttactttctataccttatttaccggatggcagcctgtctaccaccatcggacgaacaatatttcctcctaacgaaacaatactatccttgacaaacatatctacgacaaacgaattgcgaggatgtatctcagactcacttttgtgcgcatggaaaacatagcgcatcttaccttccatatcaacaaaaggagcaccgtgaccgacgccaactagcccatcgcacttatgcaacacgggattgccttcgtactttttccacgggccgaaaggcgaatccgatgtggcaaagcctaccgcatagtcctggcttgtatagccgtttgccgaataaatcagataatagacgccattctgtttaaagacggaaggaccttccactactttgggaagaaccaattcccacggttcttcggccttgaaacattgtgtcaatgtttcttccttgatctctttcaggttctctttcagctctgcgcaccagatgacattgccgtcgttgaaacgaacgaaatatagataggcttttccgtcttcgtcaaaaaagacggaagtatcgatgctcttttcctcgcggatcggcttatgctcgtcctgcttgaacggacccaaaggagaatctgccgtagcaacacaaatatgctcttccgtcgaatagaacatgtagaacttcttatctttttcaacataatagacttccggcgcccagaacatcgattcgccgtacgagttcgcatggctaagcgacaaagccgaggcacgttcccagtattcgaggtctttggagtaatagacgtcaaaaccggttccgatattcgtcccgtaaatatagtagaggctgtcatgtaccaagatgtaaggatcagccagagggaccgtcttggacaagacagttaccggcttttcttcttctacttttccttcttcctttttatcggattcggaatccgaacaactcatgcaaaaacaaagggagaacgaaaacaataaagtaatccatttcttattcataaaatcatcagtttaattatttaataacaggacgaaacgcaccgtaagaaggctccaatttatcaacgtaaggccagccgtcttcatcccacaaaatgcggtccaacaaaacttgccgttgcgcatccaaacgttccagttcaaaagcatggtaaagcatccacgtgttcttttcgtcatcttcgagaagggtggaattgtggccggtcccaacaaagcggtcattcttatgcaggattacttcatgcttgttatccaacatttgtcctccctgtttatcgacatacgggccgaaaaggtctttcgaacgcgccacaactgtggtgtaggtgcttttctgtccttcgcaacaagagccgatagagccgatgaggtagtagtacccgtcgcgtttccacaggttgattccttcgtaagcgttgccagcgatctggcgcttggtgtcaagtttaggcgtgatcatcacatcatctgtcacatccagttccatgatataaattccgaagaagctcccccaaagcatataatacttgccgtcttcctcatagaaatactggtcgatggagttctctacattcacttcacggctgtcaaatactttgcctttcggtgtgaacggaccttcgggagaatcggaaacggcataaccaacggtgctaacccaatgattaccccattgcgccaaagaatagaaaagaacatatttgcctttcacatagcgaatctccggggcccaaagatgagcacgttctttgacatccttgttgtcgggcaagaagtctggacgagtctcatcagtgaaggcagttcctatctcttcccattccaccatatctcttgatcgaaaaatcggcaagttacggatatcttcagtcgcatataaataaaaataaccatcttttgctcgcatggcagtcggatcaggtgcagcaatccgtatcaccggattatgataagctagttgtgaatcatcaactttcggaatatcctgcccatccgaatttccagtattaccatttccactacaagcagtgcaataaatagcacaagacaacaagaaaaatttttttacattcttcattttctatctatttttatgaagaagctattacaatagtacatatcaaaaatataaacttttgcaacagcttcttctttacaaaatcattacttccaacccggattctgttccatattcgggttcatctgcgtttcgttatacggaatcggatataaccaataatggtctcccccccacgcataatgataagttgcctgtccccaaacctgtcgcagaccgttcaccacctgtttgccgttgtcgtcatatgtggcaaactttttgtccttccaagtcttccaacgaagttcgtcaaagtaaatcaggtcttcaccaagcaattcccaataccgttcgttccggatacgttcacgcatatcagcttggcccatcacggtcgttgggacattggagttgagcaattgggcaccggcacgagcacgtacctgattgacaacagtaaccgcttcgtctatcttgccctgttcgttcaatgcctcagcaaggttcaacagaacatcagcataccggattttcggcatatcaataccagtacctttttggctaccttcaccgactccttccgtcacgaatttacggttcagataataaaacatcgcctgcgtatcagtacgcaaatcactcgcttcacgcgtaatcgtaccatccgcattttgtgtttctatccactggctacggaacggatagcggtttgtaaagtaattatcagcacctccgtcacctcctaaataggtggcatacggcgtaatgacactcatttctaaacgcggatcacgctgttcgtaggccttgcgaatacgagcttcattgccactcggcagataataatccatattggccccctgctctttcgcatttgcgatttctgattccgtcaagttatcacgcaagaaaaagacacggcgttcattgaccgtcaacttataatactcgggaatgatcttcgaccagtcgaacttgcttccatccgcacactcataggtatcaacgaaatccggattgaccaaatagttattccacatggaaccataagtacaacgattaccaaatccccggttcttagaattccaataaccatcctcttcgatgcactggacagagaagatcatctcatcacactgctcattgacctccttgaacaacatcttataggcattcgcaccggaagtaaacaggcgataaccacaatcaccgacctttttgaagtcagcttcagcagccccccagttctccaaccacaggtatatcttgcctctgagcgcatacgctgcacctttcgtaatgtgaccataatcattgtcgccgctgttgtatttatccggcaaatttggctcgttgatgcaatcagtcaaatccttaatcaactcattccagagatccgtcatagaaagacggctacccttcgcttcttcgatgttcttgattggctctgtataataaggaacaccaccaaacagcaagttcaattcataataccaatagctacggagaaatttggcttcagcaatcaaacgtgctttcttcgcttccggaagccctaccacatccggcatattagcaatcacatcattgcaacggatgataaacttatagttgtcatgccaaatccaactcggaccatctcctgatgtcgtctggttgccaaacagcataccaaagttacgccagttcgcatcgcgatccatcactgccgaaaagcaatcgaaccacatattatagttatcattatacaaatggttcaatccattgtataagccggtaacagtctgttcagccatcgtggcatctgcccatacctctccttcactcggctggtttttcggagtcaaatccatatctacacaacctgtaaagaacaaacctgacaaaattgttgctgaaaaaagttttgccatgtcttttataattcccaaattattcttgtccatactttttttcacaatttaattagaatgtcacattaacaccaaccgtatactggcggatcggcatataaccgtcaccggccatacgttccggatcgctaccttcgaacttagtgattgtcagtaaattttcgccagacagataaactcgtgcattctgaatgaaggctactttcatccattctttcggaaaggtatagcctatcgtcaggtttttcagctttatgtagttaccattcttcagatgccaagaactggtagcacttgcctgaccgctgttctgataaccaacgagacgtggcgtttcggaataaatgttcgtacgcggatcattcggattttcaggatcgaagaaatagtgatcataagcaatgtcatatccgagaccatatccgtgcgtaacactgacgctgttttgcgtttgtttgtaataatcgatcttgaatccggctgctcccgcccagttcatcgataggtcaaagcccttccatgtcatgcttgcctgcaagccgaagtagtatttcggtctccaagaaacactttgaaaatcgcgatcgtcatcattaccataaataccatctccgttatagtcagcataaatcatatccccataccaaatcttatctttgccgatcgcttggtttgggtaaaacttataaccagcatcaaacatcgcctgcaaccatttcatatcagcctcagtacggatcattccgtctttcggtcccccattaatattcactgtcccatcactattgaaataagaaccgttacctttgtatggattcatcatataatattcattcatctcgtggccttccacgatcaagttggacgaaccgtttgctaccgtaccaacattctgataccacactttattgccgttggcatccgtacgccattcgcggaccaactcccctttatatttcgtcactttattcttattataagtaaagtttcctgaaactgagtaagagatatctccgacacggtcattccaacccaaagtaatttcaagccctttgttgttaacacctgccagattctggagcggagaagtaaattggttcagagattccggaagcgtcgggcgatataagattccatccgtttttttgtcatatacttcgatcgttccgttcaaacggttgttcaaaacaccgaaatcaagacctatattggtaatagccgtttcctcccattccaaagcgtagttggagaaagtagtcatggctaaaccattggatttattgctattgaacgcatagttgtagcctgaaccgtaaagtgcctgccactcgtaattaccaatggaattattacccaacttcccccaagatgcacgcagcttcaaattactcaaccaatctatatctttcataaattcctcttcagatatacgccaaccggcagagaaagaaggaaacagaccccaacgagaatcgggagaaaaacgagaagaaccatcataacgcatgttcatttcgaacaagtaacgattgtcaaatgcataattgatgcgaccgaaccaagaacgagaagaatattcgtatgaagaacccttaatataataaggatccgtcatggcatcaaagtctgtcaaattgacacttgacataccttccttacaaatatccacttcgtctccccagttacgcgattcttcataaccgatcaatgcacccacatcgtgctttccataagtatgcgcccaactcaccagcatattggttttccagtacttttcacgtctttcccaatcatacaccttataagtagccatatccgtagaagtcggaggcgtactcaaagtcattgtacggttgaaactgtactgttctttataatcagaaggttgccatctgtgatggtttgtaaactgatcataataaaagttggctgtaaacttgaagtctttcaagaacttcacttctatatacgggttcacgaaatatttgttctgcttgtagtaaccatacgagttactcatattcagcaatgggtttcctgcctgcccgtcttcttcgttagtttcgattccaccatatttgccgtcataataaggataaacacctggggtcaccttctgcatgttcaatccccacatatcgcccagattattgcgatcctgatcggcgttatacccccaagcacgcattcctacagtcaggaaatcggttactctcgactcgatgtcactacgcaaataatatttctttacccccgactcgataaccaaacctggattattcaggtaagtacccgaaatcgcatagttagtacgcttttccgcaccagtcaagctgatagtatgttcctgcatccatttcgggtcataaacgacatcataccaatccgtattcggatgcgtcacataattcggtatgccagcgacattcgtcgcgttcgggttattagctgcttcacgccactcattgatcgtcgactgggagaacttggccgcctggttcgtgttgagataaccttcgttgacaaactccatataatccgcataatccgttacctgacgaatcagcttggccggagtctggtaagaaaacttgcccgaataggtcacattgatttttccatccgaaccacgtttcgtcgtaaccaagattaccccattagcccctctgttaccgtaaatggcacaagaagcggcatctttcaagatggagatcgaagccacatcatttggattcacttcattgaggctcatctccattccgtccacaaggatcagtgggccagcatcgttcatcgtacccacaccacggatcaagatggaagaaccttcggcattcggctggctactagtattcatcacattgacaccagccgccatacctgacaacgatgcggcgatcgtggtaaccggacggctcagcttctcatccgtaaaatttagactggctacagatccggtcaaattcaccttcttctgagcagcataaccgacaacaacaacttcttcaagagcttgggtgtcatctttcaatacgatttcgaaagcccctttattacccactacaatctcttgggccatgtaaccgatataggataccgaaagtttagaatcggcagaaacgccttccagcgtaaatttcccgtccatatcggttattgttccgttggtagtgccctttaccgaaacattcgctccgacaaccggttcgccattaacatcgcggacaactccggtgacaatctttccctgctggtgaacgccagcctccttgacagttatgataatgtttttattcgatatcgtataactacaattcgggagaattgtagtcagtatatctgatatactgagatcctcagcattcaatgtgacacgtttgtccacgtctattatttcgtcattataaaagaacgtaaactcactgcaattttcaattttctttaatacctctttgactgttgagtttttcatattgaggctaatccggacagtctgagaataagactctgtagcataaagcccacttaacatgaaagttaacataaacagggctaaattcatcaccctggtttctttttgaataaaagaatacaaaagaccctttcggttaaaataaatcatattctatatagattttcagttaaactttatcgccgaaaccaaataccggacgatagattaattatttttttcgacagacgaatgcaacccacatacacctatcctcttttttcacaataacatcatttgtctattcccataagcaatctgtttttaaagttaaacatttattttcgaggagttatatatactttatttttctttatctcatacctaatcggagcaatcagactcatcgcctccatcacctcttcgatgctctcctgccggattgtgaaagaaagacgagtggcagcggcaaactgcttcgggcattcaatgtccatattatagcgtccctccatactgattaagatatcagccagacagtcgttgtcaaataccaggcggtctttgatccaatcggtatataaaccggctttggcttcttcgacagaggcggtctgatccgacttacggtatctaaacagttcatccggtttcaagtaaaccggatctttcaaggcttttcccgatatcttcacactaccgttcagcaaagcggtctttacaaattcaccggaagaatagctatcgagatcgaagcaggtccccaagacctctacatctatctctcccgcctgtacgacaaaaggctttttcgcatctttcgccacctcgaaatatgcttctccctccaaagagaccaaccgtctgtcatcggcaaattgattcggataagtcagtttagtttccgaattcagccaaaccaccgatccgtcaggcaacttgaaccggcctttgcttccttttgccgtaatcagttggttttgcacgatgacatcaggagcggaatgctccttccaactgccgataccataaccgattcccagcaaaagcaacaagacggcagcaatccgcgtccaacgcaaaaccaccgataatgtatttctcttcgcaggcaagttcctctccatccgtccctgctccagcaagatacggtttttcagtttccccaaagcgatatcgatctccagctcgtttccggcagcgacattacaagacagccacaggtcacgagttgcaataaaatcatcccgattatcatccgattgtttcagccatcgaagcaatagcctcttctcttccagttcagccgagccatccagataacggattatgatttcgttgatatcgtgtgtttcttctttcattacagattcatttattagtaatacaaaaaaaggtagttttaccctaccttcatcctacaaagaattaacgtttctttttattctccggcatgaaactttcgttccaccctctggctgtctaaagagaaagacaagtgacagccaacactaataaagggaataagtccctttggataagatattctttcaacccggaaagagccttgctaatctgcttttcaaccgctttgatactaatattcagttgttccgcaatctcacggttcttcaatccatagctccggcttaacataaatattttatggcattgagggggaagcgtgtttatataagacatgatttcttcttccagttctttcaataacaagctctgctcggaattttgcatataagaggaaacgtactgatccaatatatccgtctctctctcaggtttcaaagggtatacatcctgttgtttcttatccaacgcattcagagcatgcgtatatacggctttgaaaagataagactttacagattcatcctcaaaacggatactttcacgccgcttccaaagttcataaaaaacatcctgaacaatatcttccgacaaatccttatcattcacaaaacggaaagcatacgcccgcaaaggtttgtagaaacgcttgaacagtgtttccaaggctgcaaaatcctgaacatatatctctcctgacatgaatttgttgttttataaaaagcaaaaatacagatatttttcatttaatgccggcagaaggggaatattgataactatataagcaatattgccatttacaatgcaaccatattatcactatctttgttttattaataataaaaggaaacaacatgacaccgattgaattaacaaaaacggaatttatacagcgagtaggaaacttcgaagaaagccccaaagattggaaatacgtaggcgacaaaccttgtatcgtagactttcatgctccctggtgcggctattgcaaacgtctggagccgatactcgatgagtttgcaaaagaatacgacggaaaactctacatctataaagtcaatgtagacaacgaagaagaactggaagctgctttcaagatccggacgatcccgactttgctcctctgccgcatggacgggaataaagaaatgatgctcggcacgatgggtaaaccggaacttcgcaaagtgatcgaaggcatcttataatgtctctatcaaatattagaatacagaaggtatgaatcaggaaagccaagcgctaattctgattcatgccttctacttttatacggatcgagcctggagtccgttggaagcaggaacaaaacagattcagatcattcgtcttttgcatgaactcctgtaatatccggcattcctcatccgaccatgtttcataatgacggggatattgtttacgaactctcattatcgactcggatacatccgttttcttgatacccaattgccggatacgctctttgaaaccggccagatcttcatccgtacagttgtttaccggatcggcatcaaagaaacccggacaaatcttattcccgacctgttcctgtttcggtacagagacaggaataggttcgaaaagaacggattccggttctattgcatctaactccttccttaagtttgaaatatgcttcgctgcttctggagaaatcaatttcacggaacattcatgacgggaataactcccatttctacgtgcagaaagccagttaaaggaaccttccaccaataccgaatcatcaatcgcaagcgatttattatgaatgcctttcaacagaatcaacttaacaccgttttcggttaaagccttccgcccggcaacggcctccttccgcaacacaccggtttgtttgtcataatccaaacggaaatccgaatacaccacgacttccacaccccgctctaccgcttcccgcatcagaggaataagattatcatgttcaatcgcctggatcgatataaaaggagatacgatcagcaacctttttgtcgcatctttaaaggcttgccgcaacaaaccggtgtgttccttcaatgtcgataaacgttcggccggctggtagcggcaaagcggttccttttgccgatagatgaaattgccggacacttcgttcgctggatcgtcaaacaaccattttgccaggttaccgacaggcgtatttcgttcgggatggaatatattcatattcccgaacaccagaaaatgatattgcgcacgcgaaacagccacgttgagcatattgtactttccaccttgctccataaaataagaagcatcaccgggagaattgaccgatgaaaaaatcacgaccggacactgcgccccctgcaaagagtgaacagtaccgatcgtcataccggcaaacgcttccgcctccggcgactgttccgcaaggctacggatgatctcttcctgcgccttaaatggggtgactacagccactattttacggatcgactccttgtaagcgctttccaacttatctttttccgtttccagccaagagacgattgctgccgcttccgctctgttcaagacactgcccgtcgcccctttttcactgactccgtttacatggacataccctttaggcggcaagtctttatacttcaccttgtttcctttcttcggcagcaaacggccgtgatacacatagtcgttacaataagcaatgataggatcgagacaacgcctgtgttcggtcaagaaagcgcctctttcaccggcgacttcgaaactgcaactcttccgcgccatcttcataatgcttccggatgaggacaagaaaccgttttcatgcagaaacgcataccgatcatcggactcggaggatactaagccaaaacgtttcagattgatactggaatattcgtccgagatggaccatatcggttcgatctgttccacgtctcccactaaaatagcttgcttggcaaggctgaaagacggaattgccagttcgggagatacctgccccgattcatccacaatcagcaaatcgatcgcatcatagagcggcgcatcccactccccattgtccgcacaaaccatgtatttcggcaaagaatggaaagtcgaaataaaaacaggcatcacacaggccaaacgcttcaaccgttcggtgtaatcctctcggccacgtgtctccccctctttatcgcatccggccaagcggcggatgaactcggcttcccggtcatggatggcataccagaacaaaagatagcggtaactgatatccagccgcaccgccatatcttccgtataaggaagggcattgtattccggattggcaaccaacttgtcatagcatgccttaaaatcttccgtctgctcccagccgcatatcacatcttcatagcttggatgtttttgaaatttacggagcagtttactcagaaaacctttatccgccatctcttttccatattgtttgagactggcaacattcaagcaggttccaatctcatcccgcatcttcctcatttgcctgcgaaggaaacgctggcatgcaacttcatcccggcaagatgtctgaaagaaacgattgaaatgttccagatagaacccgcgatattcttccaaccgggcaggatcgtcataatcattcggaaagccttcacctttcgtattgaacatcattttgtactgatccttttgttcgtctttgcctgacagatacaatcccaacgtatccaaaccgggcagccagcggagagtcaacaggtttgcaggcttatcgccagaaggctgttcgatcttgaaatctttcaggatattggtaatcgcctggttattggcggaactggctacgatgatatccggatcatcaggatgctccagtacggcatggacgatccggttggcaatcaccgtctgtaaaaaggtcgtcttgcctgttcccggaggtccgttaacggcaaagatatcggaacagtccgggtccgtatacatggcaagcgtctcacgctgggagacggacagcggaaactcgccactcatctgtgcccaatggtctttattgcaataaacttgctgtctatccggcacaggcagcaatgtttccagctttttacggatcagaagttccagtaacggatgggaagatttactttccaatagcttgtcatacaagttgatgatcttttgtgccattcctcgtccgggagctttcacgacaatgatttcaggcttgtcggcataattcatttcccggaaagtcaagccggtcgcatcttggaacagtttttcgcaggcactccaatatatcttccagtccgtctcttcggtatcgaactcgctcaagagccggtccacattcgaaagggatgcaatagttctgtcattgcgcgcattcggagacaaaaacttacggacaaaaaccggaatacgttcagacttgttgtcgcagacctggaaagtgccgtccggcaacaatgtcgcggaaatcaggaaggggtactccggagtattctgtccggaagcccacccgttttcgtactcaggaagaaagacacaaggagcaatctgtattttacgtttctcgtcatccgtcttttgcttccctttcgggaaaagcaagggaatgtctttacgaagtataaattccggaaccttgtcacctatccgcaatgtaacccgcgcttctttctttagcgacctgctccttcgttcggcatccagcaggcagtttttccagtatttcagtagttttttgtccattcgatcagtaagccgtttgttgtctctttctatttcttttcccggacggttatatgaaaacaaccttgcttgcgttcgtgtttgacatagcaacgctcttcccgtttcaaatcgcgcaaaaccattgccaataccattttcaaccggtctttgtcgatattcagagtatcgctctcgtctactttggtataacgggcccaggagacatcaaaagtcgttccgtagcggtgggccgaattttgggaggaattggtatttctctttttcaggttcttgacatcatcgaccgtacgggtgacactggtcactttgattttgtagaccgaagcattcagattgcgtaaggaatcctggaaattatgtccgatatcttccagcaactgtgcggcagaggggatcagataggggatggaatgcgtcagcttttccacttcataatattcgttagtttcgatctcctccatctccttttttactttctccgcttcttcacggttcgatgcaggttgaatgccgatacgttttgcttcggccagatgtacatcgttcaggtctttgaaatcgcggttatagcttccgttataccagatacgtttcaactctccgcgttcttccttttttccacaagacgaacatatcactgccaccgaacaagcagccactatcaacccgatactacatattatctttttcatcatttttcttttagcggaaacaaaagtaaccaagattcactgatttcaaaatatttatgactatttttgtgaattctgaatataaaccaaaatagttaattgtatggacgcattggaattaaaactgtcacttatcgaacaactgaaaacgatcgacgatgtaaaactgttgacacagatcaaaaatttgatcagcatagcaacagaaaagaaagaaacgcgctatccggcacagatgacgctggacgaattaaaggaagtgttgaagaaatcgagagaagaatccaaaaaaggattaggtatgacaacggaagaattacgtaaacgatacccactatgcgaataataataaagtggttacctcaagccattaccttacttgacaacatctacagattctacagtgaaaaaagccagaccgcagctatccgtttatacaacagactattggattctgccgaacctttacgcatttttccgcaagcgggccctatcgaaccgttactgaaaggatatgattgtgaatttcgttcccttgtcgtcgaaaaacattacaagctgatttacacggttaccgacgaactaatcgaaatccatgccgtttgggattgccgccaggaaggatggtacctgcaagaaatgttcaaataatcttcgtgaagagacaacaaaatgccccacaatttatctttacataaagaatattactaattttgtctgcctgaacgagagtggtagaaaactcgcgacaaaggcaaaactaaaacaaattgaatgattgaacgaatttatattcttgagagcgtagacccggttatattctacggagtaaacaatgtcaacatgcagttgatcaagacattgttccccaagctacgcattgtggcaaggggaaatgtgatgaaagtgataggagacgaagacgaatcggagctctttctcaagaaaattcgcgaggtagaaaaatattgtgaggaattcaactcgctgagcgaagatgtcatactggacatcatcaaaggcaaagccccggtgatcaccaaacaagagaacctgatcattcacgggatgaacggcaaaccgatcgtcgcccgcacggaaaaccagcaacgcctagtcaaagcattcgaagaaaacgacctcgtctttgccacgggccctgccggaacaggtaagacattcgtcgccatagccctcgccgttaaagcacttaaaaacaaagaaatccgcaagatcatcctaagccgtccggcagtagaggccggtgagaaattaggattcctccccggcgagatgaaggacaaactcgacccgtacctccaacctctgtatgacgccctgcaagacatggttcccggggccaagctgaaggaatacatggagaacaacgtgatccagatcgcccccctagccttcatgcgcgggcggacgttgaacgatgcggtcatcatcctcgacgaagcgcagaacacgacgacccaccagatcaagatgttcctcacccgcctcggaatgaatgcaaaaatgatcattaccggagacgtgacacagatcgacctgccgccgacagcgacctccggtctcgtacaggccatgcaaatcctgaaaggcgtaaagggaatcggcaaagtcgaattcgagaaaaaggacattgtccgccataaactcgtccaacgtatcgtcgaagcctacgacaaattcgacagcaagcatggcaaaggcggttcgagaaccgtctccaaggaacagcaagaagagataaagaacaatattaataacagtcaggacgcccgataagcgccccataaaaacaaagatatgaagaaggcattaacaaaaacagacttcaatttcccaggacagaagagtgtctatcatggtaaagtacgcgatgtgtacaacatcaacgacgatgtattggtgatggttgcaacagaccgtatctcggcattcgacgtagtcctgccggaaggtatcccttacaaaggacagatgctgaaccagatcgcagccaaattcctggatgcaactaccgacatctgcccgaactggaaactggctactcccgatccgatggtgaccgtaggcgtgatgtgccagggatttcctgttgaaatgatcgtacgcggctacctctgcggaagtgcatggcgtgcttataagagcggcgtgcgtgaaatctgcggtgtaaaactgccggaaggcatgcgtgaaaacgaacgtttccccgaaccgatcgttaccccgacgacaaaagccgagatcggcgaacacgatgccgacatctccaaggaagaaatcctggctaaaggtctggccactcccgaagaatacgaactgttggaaaaatacacgctcgccctcttcaaacgcggtacggaaattgctgccgaacgcggcttgatccttgtcgacacaaagtacgaattcggcaagcatggcggcaagatctacctgatggacgaaatccatacaccggactcttcccgctatttctacagcgaaggctacgaagaacgttttgccaaaggcgaaccgcagaagcaactctccaaagagtttgtccgcgaatggctgatggaaaacgatttccaaggcaaggctggccagaaagttcccgaaatgactccggctatcgtagacggtatcagcgaacgttatatcgaactgtatgaacacatcacaggcgagaagttcgaaaaaggcgatacggacaatctcctttcccgtatcgaaaagaacgtaaccgaatatctcaacaaataagataaacggatatggcgaagtacggttcagaacagattctaccctacaacaacgaggagcacaaaacgacacaagtcaggcgcatgtttgactccatcgccggtacatacgatcagctgaaccatacgctctcgctgggtatcgacaaaatatggcgcaggaaaggaatcgctttcctgcgtcctttttctcccgcctcaattctcgatatcgccacaggcacgggggatctggccatctccatgcaccgccgcctgaaagccgaccgcatcatcggggccgacatctcggagggcatgatggaagtcggacggcagaaagtcgctgaagcgggattgtcggaccacatcacgttcgaataccaggactgcacggcactgacctatccggacaactcgttcgacgccgtcaccgccgcattcggagtacggaatttcgaaaacatagaacaaggtatcaccgagatgtaccgggttctgaagccggggggccatctgatgatcctggaactgtcctcaccggtacatttcccgatgaagcaactctacaacatctattcgaaagtcgtgatccctaccgtcgggcgcctgctatcaaaagagcatacagcctacagttacctgccggcctccatcaaagtcgttccacaagggaaggtcatgaccgacctgctcagccgggtaggtttcagcgaagcccgttcgcacactttcaccttcggcatttgttcgctatacacgggcagcaagggcggttcgcaaaccaccccaacagtataaatcatcttaaatttacaggtcatgcaaaaatatggtttaataggatatcccctcggacactctttttcaaagaactacttcaaccagaagttcgaatccgagaacattgatgcaacttatctgaacttcgagatcccgaacatcaaagatctgaagactgtattaaaagagaacccggaattgaacggtctgaatgtcaccatcccctacaaggaacaagtcattccctacttggatgacctggacgaagacgctcgcttgatcggagccgtcaacgtcatcaaatttacgaaaggcctcttcggcaaaaaactgaaaggctacaactccgacatcatcggcttcaagcgctccatcgaaccgctcctgaacgaaacacatcgcaaagccttgatcctgggaacgggtggtgcgtcaaaagcagtcttccaaggattaaaacaattgggtgtcggcgccacgctggtttcccgtaaaccgaaagagcactgcatcacctatgaagaaatcactccgaagacaatgcagcagtacaccgtcatcgtcaatacgaccccgttaggcatgtacccgaatatcaacgcatgtcccgacattccttacgacctgctcaccccggaccatctgttgtacgaccttctgtacaacccggatgaaactctcttcatgaagaaagggaaagaaaaaggagccgtcgtcaagaacggccttgaaatgctcctgctacaagcattcgcggcttgggaaatctggcagaaataaagcatagctttacgactcctaacccatagcattagaaggcataaccctatgggttaggatatatataccgatactgaaaaaaacaattcaactccgggttaatacgaaatcgggggtgacaaggtagtccaaccgataaaccgccccttcttccgtacgggtttcatagacggtgaaactcccttcttccgcatagggaaacggacggacatgcagatggtgaaggaagtcgacttcttcctgcccgatcatcttgaaaagcgtctcttttgcacaccaatgaagcaacaagtgctccgtctcgtgctctttgtcgatacccgcctcttcttccggattcataaagcgactgcgtatcctcgacaccctcccggaatggtattcgatgtcgataccggcggcaggacggttctgcaacagaacggcggcataacctttcgtatgggaaatgctgatatgcaaagacgagccggacaggtaaggcgcaccgttcggacgataggctacgcagaccgggccgcccgtaagctcctgcaaaagcacacggcaggcaagccattcccggcgacgctgctccgtacggatcagctccagctgcggaagatattcttccctgttccgcaaaagggacagaagcacttcggaagactcctcgatcttccagattccccacaacggaccggtatgtttcatcaggagaggcattatttcttccactcaaaagattggatcagttctacgatatcctgtttcagatatcgggtgacgggagccagcgaatctgcattcgggatacaatcataatacaaagctccccggaaaaaatgcgagacactgtcggtcaacataaattgcaatggcgaagcggattcgccatccagcatgaaaagcgaaccataaaccgaagcctccggattgctgtacgcctgcatcttgatccgttccggatatttcgattgccggacaaccaacgcgcgacactcctcctccgccctgcccagcgtagccggagtgatagggaaatagctgcaatagagcttcacgttcaactgcggataagagagattgatccaccctgccggattcccgaccggaggcaactccacctctgcccatctggaaagccggaaagtataaggtaaatcccttaccggaagtgcctggtaggaaggggcaggcggttcgatacggaaatagccgcgcggcttcggtgtatattccgtacaggaaacacacaaggccaacagccccccacacactataccggttgacatacgcattactcctcttgccgctcctttccttggtccgaaatgcggttgaacttgactttcaggatacggcggttatcgatctccagaacctggaaacgatagtcgtcatattcgatgatctcgcggcggcgagggaagtcgcctttgatctccaacagaaggccggcaagagtttcgacctcctccgtcagtttgccgaattcggtaggatcggcatcgatcacacggaaaaagtcggtcagcaatatcttggcttcaaaaataagactgccgtccgccaggcggatgaactgcttttcatcttcgtcgtattcatcggaaatctctccgacaatctcttccaggatatcctccatcgtcacaataccggaagttccgccaaactcgtccaccacgatcgccatatggatcttgctggtacggaattcctccaggagatcgtcgatcttcttcgtctcaggcacgaaataggccggacggatcaagctctgccaacggaacgtgtcaggcttctccacatacggcaaaaggtctttgatatacaggattcccttgatgttatcctccgaatcggcataaaccggaatacgggaataaccggatcggatgatgaaatcgaccacggtgcggaaactcgtcttgatgtcgatatcctccatatccaggcggggcgtcatgatctcgtcggcagtcttgttgtagaacttgatgatctccgaaagcatctctttctcttccggcatttcggtggaagtgagttccaatgctttggaaagctcgtcgaccgaaagatcgtacttcttcttgactaacgccttgttgatgacgctggtcgacgtgaccaatatgttcgaaagcggccggcagacacgctccacgacattcagtacaggggccgaactgcgcacgaaccgcagcgagtttttctgtgcataaatcttcggcatgatctcgccgaacaacaaaaggagaaaggtcaggacgatcgtctccagaataaagcccaacatcggggcggatgagaaatcgacgatcgcgttgataccgtaggtacaaagcatgacgacagccacattcacaaagttgttggctatcaggatagcggcgagcaggtactcggaacggtccagcaaacgctggattaatgggtctgaaggtgcattctcttcccggatgtcgttgatatcacccggggttaacgagaaaaatgccacttcggaagccgacacaaagccggaaaccaacagcagaagaattgcaaggcttaacgctattacagggcctgctgtgagcgcctgtatagtaacctggtcgaataagcccgataaataatagtctgagtccaaggggaacagtattagttaaacaatatcagaacggaaggtcgtccgcactgttggaatctaaagatgtgtccggttgtccggatgcgggttgctggtagcccgtcgcctgctggtatccggtggacggctgggcggtctgaggctgtgccgccgtcattcctgtaccggaagcattgtcacgatttcccgtaccggaacctgtgctgtaaaattcgacacggtcggcatggatttccgtcacataccgcttcacgccggactggtcgtcgtaactacgcgtacggatcttgccttccacatagagtccggaacctttcttcacccatttttcaacgaaggaaaccaaatcacggcgaacgaccacattgtgccattccgtacgttccggaacaaccgtaccattggccaacgtataacccctctcggaagttgcaagcgggaagttggcaacagcagcgccactatcgaagtaacgtacttctggatcgcgtccgacgttaccgatcaatataactttattcaatgacatagctctattcttttattagtctacaaagaaacacaaattcagtcattctgacaagtttccttctaatttctccaaataaatatgtatcaggcgaggaaccgcatatttctccacatcgtcagtcgccacaggaaggtaagacttcagggcatcgccctcccgctctatctctatccggtagaaagccgtatacaatatctgatgggacaggacatgtttcaccccctgcaaatcagccgaaacattcagccggcccgctcctgcaaacagccgacgaaaagcatccgtcgtctgcaactctgcaaaatccatcgccttgtccgtttcgataagcggaaactcgtagagtccttcccaaatgtctttccctttccggcgggacagccaggtttttcctttatatataatgtataaataatgaaaataccggtcacgcgtcctggtctttttctgtttcaccggataggtctgcacatcgcccgccccataagcagcgcagtgccctttcaacggacaagcttcgcaatccggattttgcggcacgcattgcaaggcgcccaattccattatagcctggttgtgttgcccggcataccgggggtccatcaccaagcctgccagttccgtaaaggcttttttccctctgggcgtatcgatcggagtatctaccgcaaacaggcgcgaaagcactcggaagacattcccgtccacgactggatacggctggttccatacaaaggaaacgatggccgccgccgtatattctcctatccctttcaaagagatcacatcctcatagcgttcaggaaatatcccaccgaaacgttccataatatcttttgccgcagcatgcaggttacgggcgcgactataataaccaagcccctgccaatatttcaacacctcgtcttcctccgccgaagccagcgaagccacatccgggaaccgttcggtaaaacggagaaaatagtccatcccttgtgccacccgtgtttgttgaaggattatctcggatatccagatgatataagggtcggaagactccctccagggcagctcccttttatgtatccgataccagtcacgcaacaaacggctggtttctaattcgttttctatctgcgacatacggttcttttttgcctcttcaaaacttgcaactaattgattactgcaaacatacacagttctaacgaattgtaaggaaacttttttcttaaaatttggctgacaattctttttccacttaaataaaaagctatatatttgcattccaaaaaattaataggtccaaatcaattatttaattaatttatagacatgactaaagcagatattgttagcgaaatttcaaaaagcactggcattgacaaacagacagtgttgaacagcgtagaatcttttatggatatcgtaaaaagttcattgtctcagggcgaaaacgtatacctgagaggttttggaagtttcgtgattaaaaagagagcccagaagactgctcgtaatatttcaaaaaatactacgatcatcatcccggaacataacattccgtcattcaagccggctaagactttcttgaacgaagtaaagtaatttagttattatagtttaatttaaaattttaaaacaatgcctagcggaaagaaaagaaaaagacataagatgtctacgcacaagcgcaaaaagagactaaagaagaatagacataagaagaaataagtctatttgagtaactctgaagaacaaacttaataagagaccttttaagtttgttctttgcgtatttaataaggtctcacattttaaacacctctttttatagtgattagtgaattagtagttgatgtacaacccaaagaggtatctatagccgtactggaggataagaaccttgtcgagctccaaaaggaagcccgtaatgtctcttttgccgtcggcgatatatatctgggcaaggttaagaaactgatgccgggtttgaacgctgctttcattgatgtaggttataaaaaggatgcatttcttcactatctggacttaggtcctaatttcaacacccagcagaaattcctcaaacaagcattaggagaacaaaaaggagataaaaaaatccccactatctctaaaatgcagttgcttcccgaaatcgaaaaagacggaagcatcagcaacgtgctcaaagtcggacaggaagtgctggtgcagatcgccaaagagccgatttcaacaaaaggtcccaggctgacttccgagctttcttttgccggaagatacatcgtgctgataccgtttgccgataaagtatcggtttccacaaaaatcaaatcgagcgaagagcgtgcccgtctacgccaactcatccaaagtatcaagccgaagaacttcagcgtaatcgtacgcacatcttcggaaggaaagcgcgttgccgaactcgatcatgaattgaagacattactgaaacgttgggaagagaacattcctaagatcaccaaagtaaaagctcctgcactcatctacgaagagacggcaagagcagtggctttgttgcgtgacattttcaacccctcttttcagaacatttatgtgaacgatgcggacatctatcacaacatccgcgattatgtcagcctgattgctcccggacgggaagagatcgtgcaacggtataccggcgaactccccatcttcgacaactttgcaatcaccaaacagatcaagtccctattcggacgcaccgtcacgtacaaaagtggagcctatttgattatcgaacacacggaagccatgcacgttatcgacgtaaacagcgggaaccgctccaaaggcagcgatgcccaggaaaaaacggctatcgacgtgaacacggcagcagcagacgaaattgcccgtcaattacgcttgcgcgatatgggtggtattatcgtagtcgactttatcgatatggccgaagctgccaaccggcagaaactattcgaacatatgacgaaagcgatggctaatgaccgggcaaaacataatattctgccactgagcaaattcggcctgatgcagatcacccgccagcgtgtccgtccggcaatggatgtcgatacatccgaagcctgtccgacctgtttcggcacaggcaccatcaaaccctctatcctgtttaccgacagcctggaaggaaagatcgactgcttggtcaacaaacacaacgtgaagaaattcgccctgcacgtacatccttatgttgcagcatttatcaagagcggaagattcccgctcagttggaaatggaaactgaaatactcgatgggtattaaagtgattccgaatcaaagtctgggcttcttggagtataaattcatcgactccgacaagaacgaactggacatgatggaagagaaagaaatcaaataacataaaagtccccggatctcataaaagttcggggactttttttaatgaaagaaaatatcaatgagacgtttttatatttggctatggctgctcttactggtctgcggcagctgcacgaaagaaaaacaagagttgagtgtattgcacttgaacatctggatggaaggaacagtcgtcaaaaacggcttcgaggccgttgcggatgaagtggcccggatagatccggatatcgtgatgttcagcgaagccagcaacaaggaaggcgcgttgttcgttccccgcatgctggacgctttgcgcgaaagagggaaaatctattatggacaaggcagttcgctggatgtcgcactgctgtccaaataccccatactggaacaaacggaaaacattccgcataaagaccgggtattaaggacccgtttggatgtaaacggcaaacaggtagtagcctatacagggcatttggattatacgcattacgcctgttacctgccacgtggatacagcggtgtgacatggaaaaaactggaaactccggtaacggacaaggctgaaatcgaaaaagccaataacgaatctttgcgtgacgaatccattcggctcgtgatagaagacgccacaaagtcagatgccgatttcgtaatcttgggcggtgacttcaacgaaccttcgcacttggattggacggaagagacgaaagggctttgggatcacaacggggcggtagtcgattgggtctgctccaaattattatacgaagccggcttccgcgatgcctatcgcgtcaaatatccgaatccgatcacccatcccggctttaccttcccttcggacaatccggcgatgccagtcgaacggttgacctgggcgccggaagcggatgaacgcgaccgcatcgattttatctattatataccggcaaccggttgggaagtggaagacgccgtcatcgtcggtcccaagtcttccattatccgcagccaacgtgtcgaagaggacagccaagatactttctcaactccggcagacatttggccgacggaccacaaaggagtgttaatcaagttcagcttttaagaggcggaacagaaacaaactctctgccataaaaaggcggtatgtcaaaatgtacttatcccccgcatcaagcacaggaacaagacagtctttgacataccgccttctttttccggctcaaaaccgatatcatttcttcgctttcgccatatccagcgccgaggtcgtcgtgtaatacttagccagcatattaggtacttcccaatccggcagtttgccttccttcagatagtcgaggaaatgttccgtcacttgaccgaaatgagcttcatggcctacacggtattttgcggggatttcgacttgccatacgccatcgcccaccttattcaatgccacaccaggatattcggctgaaaccttttccatagaagcggtcaggtccttttcgtaagcggccagatccatacctttcactgcttcgacaaacagttcaggctgatagttctgttccttgccctggcggatgaccaagtcggccttgctacccttcatgacggagaagtgggtatcaccgccacctttggggaaggtataattccagatcaccgaaaccttggctgtcacacctttgatcttataaacgatatcaccgttgcaatagactttcaatgtatcgttttcgacatctttcttcaagaaatcgggataagcatccgtccctgtcacctgtttgaactcttccgggctgatagaggtagtccagcggttggcatctatcagttcgatatctttcttatagtcgatgatctgatccgggaaggcttcccactgcaccaggtcgaccaggtgagtcgtcacatccacaataccttcgccctgctggtttacatccagataccataccggacgcgtcaacggcttgttgtcgaccagcttaaacagatggtgcacactctctttcacgatagccggttcttcgggagaccccttcaactgctcgccataaacagccgggatagtagaaagttcgcgctgcaacatcgtagtgatctcattccgttcggtcatgatgtcatacagcatgatgtttttctgtttggcgatagcgaaacattcctccagcaatttaaagctctggctgttgatcgccatcggtttgtcggaaagcacattgatgccggcctcaagcgtcttctttatgtattcggtcttcttgccgttgttccctgcctggatcatcacgttccccttcttctcggccaacattttttccaggtaatcatctcccgtataaacgatttcattccaagccgtcggattctccgcacgtgtgttgaatccctgtatacgtttcaagtgctcgtccacgtcgaaaccggtgggtgcgtacacataaacatctttagaaacttgcggataagacactttctgcactaatgcggcatggaaatgtccgggatcgagcgtgaccaacttcacttctcccggtgcgccggtaaagccttcggccgccttctcctgctttgtgttgcaagaagctccgaccaacaaggctgccatagaaaatacaagatagtttttcatactattataattaaattattgataagcatttacattagactgtttgcgaccacaaagataatataaaaacaaaatcatctctatgacttcgctataaaacaagaagattttattcgacaatcacagctaccggattactttcgtccacatgacagccaagctcctccaccgaaatttctcctggctgcccgaatgtttgccctatatcttatcatcaagcttttttccccttttccctctcccgtatgtacagctccaccgcctcatgtgccaggcggcggaactcttcttcgccggcgagatcgtaaaggagagcgacgaggcgggcgtaatagctcagacggaggtcgccccttttttaatcgcaccgtagctgcggctgccggcagaaagttcgcttttgtaaagacgtacggttatccggaaacgtctcatctgcttttcgacgaaaagccccaacagagggaacataaatgtcgttttcatgttataaatatttaattattaatataaatattaatattcattcataatgagcccggcatggcggggacaacatgaatggataaatgcgtaaacttgtcaaaagtttcagaggatgcttcggacgcttcgccccccgaacggcacatctgaacattgaacaaatttaataaaacattttacatggaaaacacattccgcccctcgcgcttcctctcgctccgcgcaaccaccccctctccctgcacatgggaagaaatcatgcaagaactgaccggcgagcgccatgccgccgccaccgccctgttccgcgcgcttgcagccggcgaaggacaagacgccgaaacgtcgaaacggcagcaaagccagatcaagcagaaccaacccgccttcgtcccttccgtccacctggagggaggacgctcctcgaagcacatcaaaggctatccgggctccatcatggtggacatcgacggcatccccgaagagatcttcgacgagaccctcgaacgggtaagggccgacccgcactcgttccttgcctacaagaccttgtccggacgcggcatacgtgtcatcgcatggatggaaggcgaagtgacggaagagaacttccccgcagcctggcagacggtaaacgcctactacgcccggctcaccggcatcgccatcgaccggcagtgcaagaacgccacgcgcatgtccgtgatctgccacgaccccaacgcgctctaccgtcccgacgccgaacggatgaagttcgcctccctgcccggcgccaaggccggacaaaaacaggacatcgccgcaggaaagaaacacagagggcggaagacatcggccgcacgcgccgagaacaccgtacgccggcttgtggaagaagagggcatacactacgcagccggcagccacaacgactacatcagccgatgcctctacctgatgaaccgtttcggcgtgccggaggccgaagccgaggcatgggccgtcgagctgttcgccgactatgacacggcctccgtccgctccacagccaagagctgctacgccctgactgccgagcacgccacaatgaagctctccgatgtctccccccgcaacgggaacgggcggcagcgcaaggccaccgtcgaagagatggagcgcttcatcggcggctccatgcaactgcggatgaaccaactgacacaccagctcgaacaccgtcccgtcaccaacggcatccccgcacccgacggctgggctcccatgaccgacacggtcgagaactccctttggtgctccatgcgccgcgacgggttggaggccgacctcttccacctgcgcacgctcctgctctccgacttcgcgccccgctaccacccgttggaggagtttctcgaaaaggcaggaccgtgggatggcgtgacggaccatatcggcaacctggctgcaatggtgcaccccgccgacagcgacaccgatcgtttcgacctctgtttccgccgctggttcgtcgggatggtcgccgccgcgctcgatccgaaggtggtgaaccacgtcatcctcgtcctgatcgggcggcagggatgcttcaagacatcattcttccagaacctcctgccacccgtcctcagacgctactatgcctccaagaccaactcgcaacggctcacgaaggacgacctcttcaccatgacggagaacttgctcgtcaatttcgaggagatcgactccatgcagcgcagtgaactgaaccagctcaaggccatgaccaccacgctctacgtcaacgagcgccccgcctacgggcgcaacaaggtacacctgccccacgtagcctcgttctgcgcgacgggcaacaacctccagttcctcaccgacgacaccggcaaccgtcgctggctgccgttcgaggtcacggcgatcgacaacccctggaccgcccatatcgactacgaagggctgtacgcacaggcgaaacacctgctcgacaacgatttccgctactggtacagggaccacgagatcgaggagctgaacctcgcgaaccgccgtttcgaaacgcccaaccccgcacgcgaactgatcctgatgtactaccgccaccccgtcgattacgaaaaggggacttacgtcaccgccagccagatcgtcacccgcttcggcggtagtatccggctgaacgcggtgcaggtcggcatagcactgaaagaactggggtatacctgcacacggacaagacatggcaatatctggctggttgtcgaacgcacgacagacgagatgaaaagcatcctccctgaagcggacgacacagattttcctccttcctcgggtgataggtgataggttaaatgccctttttgtaaaacttttccgagtttgaattaaaaaacgtcaccttaaaggcggcgttttttaattcatttttcctaaacttttacagaaacggggttcaacctatcacctatcaccataaaagactgataatcaaggatggcattttttcgacaccctctttttatttatttcatgcaataaagttttatctgttacttttctcttgaaagaaaagtaaccaaaagttcaaggcttaaccggctgggctactccgggcaaagactacgctgtcgcctgcgaaactcgcttgcgctcagacagcgcaggctccggacgctccgtctttgcccttcgcttgacgcccatccacttaggcctttccaagaaagctccgctttctctcgggatggccgacaccgcctcttatataagcatagctaccagtatatgcatccccccccaagcctcctccgcctctcttttgccgtctgctgaagcaggcggcatcggccatccccaaagagccgtcaggctctacttccggcctaagctggtgaacgtcaagcgcagagacctcagtgagcgcccggagcgtctgctgtctgagcgaagcgagtttcagacgcgacagcgaacgaagggaacggagtagcgaagcaggttcggccttgatcctttggttactttcggatcaagccgaaagtaacagaaaagctatgctttagcccccctaacccatagccttagcccccctaaagctatgagttacggttcgccgagcgcctcgacgatctcccgcacctgggcaggggtgtaggaacgcgaaccgggcagcttgccaagctcggcaaggcggacggcgaggccgggataatggtcgatccacccgaccagcttccggtaggcggccttgggggtcaggcaggggttgtagagttgtgccagctccgtacgaccgtagctgcggatgcggaaatcagtctgtttttccatgtcttccttatttgatttatttctacgaatatacgaaaaaacaatgattttcaagctgtttcaggtgataaaaaatatagtttttctataatagaacaccatataagccggaataaattagtcttaaaaatataacacgcaacttttcacctctcattttaccctacaatgcgcaccttccacaccccgttttccccctataacacgcatctttccggcagaactccccgcaactcccccttacgcgcaacggcacaagatgagggtgttatctttgttgtaccggaaagggaagaaaggcagggcagcttcaccggaatggtatcggtttttcatcctaattatcaactttaaaatcaaacagacatgattcgttacaagaagtatcagaaccagaccaagtccaccccgctcagcggcaagtggctggcaagggcggtggcagacgagacgctcgacacgcgcgctttggccgaacacatggccaagcacaacacgccgtattcgcaaggcgcgatccacggggtcctcaaggacatgacctcctgcatcaaggagttgctgctcgacggcaagaacgtgaaactggacgacctcgcgatcttcggcgtggggatccgcgggaaacctgccgacacgtcgaaagactggtcggtcactaccaacgtggtcgggctgcgcctcaaatgccgcgccaccggaaccctcgccatcaaccagctgaaactcgaagcgcagctcaaggagctttcaccttacgacatcgaaggtggcaataccggcggtggcggcgaggaggaacggccgggagaactttaagcaatcgacaagagaagccaagagagacacaaacaaagtcatgtgtcaaaaacttctcataaatcataattcataaatctcataatccacaatttcatggaagaaaagaacgaaaagaaatccgtctgggggatcatcctcaaagtaatcatcgtcgtggctacggccatcggtagtgccttcggcgttacggcctgcatataaaggacagggagagccgcacatgagacgcatcacactattcatcatccattgcagcgccacgcgctgcgggcagccttactcgttcgaggattgccgccgggaccatatcgacggccggcacttccgcgacatcggctaccattactacatcacacgcgacggccgggtacatcccggccggccgctctccctggagggggcgcactgcttcggtcacaaccgccacagcatcggcatctgctacgaagggggactggacggcaaaggcctcccgcgagacactcgcacgcctgcccagaaggctgccctcacgcagttgttgcaagagctgggccgccacttcccggcagctctcaccgtaggacaccgcgacttgaacccccaaaaggcctgtccttcgttcgacgcagcgaaagaatacaagaaagacgcaccccgtgggaggccctgaggcctccgcgggagtgcgtctcgtttacgcggtgttgttattgtgcgcgttttccgttattcttaaatagccggatcaacaggctcgactttcagcggttccagattatcttctgcccccggataacctatattctgattgatcacgccaccagtattgctggtaatagctgtttcgggaaccggccacaagacgtgatgcacactcatgcgatattcgccgttcggaattttaactcctttgttgaagaagttgttatgaaccatcacccagtcgaaatagaagtttacgccggcatctttgcagttcgttccgacaccacccggtcctgagaaattatccaacttatagacacgtccacccaatgcttcacagggttttccggttttagcatacaaataggaaatacgaacaagttcaacatgacggttctcttcgtaatacaattcacgggcacgttcggccaacacttcggcaataccgatatttccactcagcggttcagcgcccgcacgtgcacgaaccacgtttaacatagcagcttcgttagtcgcatcacctttccaataataacattccgccatcatcagatagacttcggcagaacgatagacataccacggtgtttcacctccctgaagatcctgcgtcttcgtaggatccggaacaaacactttgtaatgcggccacatataccagcaacggatcgaatcggcaacagacaaatcgacaggacgaatcaaattttgaccgtaatagggattgtttgtttttttcaatccagggtcgttgtaacgcaaatcttccatccgtctccagctatcgtggttgaaaggaccgcgcaaatcgtttttctctttttccccccagatttcatactgataatagttcgtcggacggcacgtaccgataccacgtccatatttcgtatcattatcaatttctgtatttttatcagcttcatctggtgcaatagctgtacccgtctttccgtccggtgtcttaatcgctccccccttcgcccaatatggcaatgcattacgcattgtatagatacggttatccttatccagcggtgttgttgtaggatgagcgaccacatacatgataccttcggtgttactcatatcaatttttgcctccacactgtgcaagtcatgcattaaattggtgttcggcttcgtctggttgcccgtgaaacgccctgtcatcaacggatgacgtccgactacttctttcccaaccgctatggctctatcaaaatcaccaacagccatgcatatcttcattagcaaaacgccacaagcatccttattagctcgtccgcgaggttgaacctctggaacccattgataggcgaactccaaatctttcttacattgctccaagatgctccaccgatcgtagctatagaagtccaacttcggctcggtgatttctttgtccaaataagggacatcgccaaattgatgcgtcaacttatagtagcgataagctctctgaaaataggcggctcccaacacagcattcctctctgcttcatctttatactcggcaccatccaaacgactaatggctatattagcatatttgattcctttgaatccctcttcccaataccatttgtttttacctttcatgtcgtttttcgtacgggaaggtaacatttcgttatccaaatcaaccaaagaaccactttcatctgtttttccatggactgcgatgtcggtcaaatacatttccgtcaaaatcggagcaccatcaccaaaaaactcatggcgcatattacgttcacaggctgtcaaagctgcataaagtccagcagcatccacatatgtattttcaggtgaatagaaagaaaggggcttcggatccaaccaatcactacatgaatttaacattggaaggactgccagcgccaaaatcatacactttttcttattcatattcttctacgtttatcaatttaattacaaagtaaagttcacaccaaaattcacagtgcgcaaagttgtatcaccaccttccggatcaccaaaatcccaaccggtaatcacaaacggattgcggacggccaaagaaaaacgcatattttgcacagaaaactttttcagcagattattaggcacactatatgaaagcgtaatattctccatacggacaaatgttttcttcacataattgtttcctttattggtagaaccaatacgtgcatagtcatccgtcgggttgtctttggtccaacgtggaatatcgacaatcgtgtaacggtcatacatcccccctgtattagcagcccggttgaacgtaccatattgccctatatgcgaatacatcataaatgaaaggctcaaattcttgaagaatacaaattcattacgccaagaccacacatagcggggagttttataaccttgaaaagttttatctttcgtatccaaaactccgtctccattttggtcgacatatttaaagtctccaggtttgtttccgtacttggaagcttcctcctcttctcctaactgccaaacaccatcacgttcgtaatcccaaatctactctgtatcatggcctataaaccactggttttcataatcatcggcttctttatatccgattacgttacccgcttcatccttcacttcctcgacatcaccgtaaagatgcttgatcttacgacgattaaaagagaacgttccggtcgaattccatgaaaaattgtcacgattgatcaaattggcgtttaacgaaagctcaaaacctcgatttgtcaaagctcctaaattggccattacacttgcatatcccaagatggaaggtagtgaacggttaaccagcaaatcgtttgattcagccatataagtttccatactaccactcaatttatcaccaaacaaagagaagtccaaacctatattgtaagaagccgtacgctcccattttaacgaactgttcggcatacgattgatatatacctgagatgtcagatatacatttccgtttggatcaacataagtataagcaccggaattcaattgtgccaatgcttcatattggccaatatcacggttaccgttctgtccccaagaaaaacgcagtttaccataattcaaccaatcagaagttttttccatgaatttttcggacgtgaatacccaacccaaagcaacagccggaaatacagcatgcggattcatactcccgaatgcagaataaccgtcacgacgcacagaagcagtcagcatatacttgtccttgaatgagtaaaacagacgtcccatcaaagcatctccggttttatatgtatcttcgctagaaacggaaggagcagtaccggcaccaatattatgaaagcctaatatgtcactcggagaataaagtttattctgggctacggttttccaccattgacctttttcggcattctgcaaaaaagtggcttcaactcgatgatcttcaccgaattctttcttccaacgaagaatattatcaacctgccaattaaatgttttttcatttttacgctctgaacgacctccatctccagcccattccggatgttctgctgactcatgattcatatattcataccagtgataacgaggcgtaaagttcatctgatattcgaatccaaacggaagttttacgattgcatacagattggcattcaaatcatggtgaatgtcacgtctgtcacgatacaagttatcgaagaacggattctttgtattattatctccagacggatacatacgataaggactgtcaagaatatcaatatcatttgtggtaaatggtgagttatgttcgcgctgctccacatcagcagccaaataaccacctaagcgagtcgcgaactgagcgttcaaacccactgtcaagaaagaagtcactttggattccaagttcaaacgggtacgcaaattacgataacgatctcccacttttacaccttctctatcagcatatcccattgaccaataataactgaaatcttctttacgattggaaaggctgaccgtataatcctgttgtagaccagtctgataaacaatatcatcccaatcagtctccactccattcaaatagttttcgatttcaatcgttttaaaattcaaacgggtcaaccatttattaatcatagttttttcatcaggcaatgcagaaacaggtgtctgttggtcataattataccaagccaacggatctatgcctgctgctgctaaatttctcggatcagcaaactttcccggctgtgcaaccatttcggcttcagtcatcaaactttcaccatattcctgtctgaatttgataaaaccggcaccatctactgttttaggtaaacgagcattgcttaccataccaacattagcattaaatgaaataaccggcttacctgttttaccttttttagttgtaatggctactacaccattagcagccttggcaccataaacagcaaccgaactggcatctttcaaaacatcgatactttcaatatccatcgggttgatgtcctgcaacgaaccatcatagatcacaccgtcaagaaccagcaaaggtgaagaacctgctttcaaagagttcttaccacgaacttgcagatcagctgtgccagcagcatcagtcgacattgaaattgataaaccggcagcactagcacgtaacaaatcttgaactgaacgaggcgcttcaacctccatcttctccgctttcacacgcgagatcgcccccgtcaagtccttcttcttggccgtgccgtaaccgatcacaaccacttcttccagctcttccgtgtcttctttcatcgtcacgttgagcgttttctgattcccaaccggaatctcttgggagatataaccgatgtaagagaacactaggatggttttgcccccttttacagaaacactgtacttaccatccacatccgtgatggaaccattggtcgtccccttttccatcacgttcacgccaatcagaggttcacccgactggtcttttacgacaccggtaatcgtcacattctgagcaaaagactgggtaacaaacagccctaacagaattgaaatcaaaccgaatcgtagcaaaaaattcaatttacacttttgcattttgattttaggtaatatattagacataaaaaatcacaacaaaaaattccactaagacattaactgtctgcagaaaaccaaaaggaaatatttgagaataaaaacaaagacatcatgatattacatttaattcttacttcagttcttaaggaactgtggtgtgataaatcgttttttttgtgtttaaataaaaaattaagtttgcattttctaaataaagtgtgtatgtttgcggccacaaacaacaaaaacttgagtgagtgttaattttttatctacaaataccacagttccttaagaactatagaataataaaggcctataacatttcatgcataacccgtcatatctttcacatgacggcaaatgtctaaactgacgtattgtcacacttcctgccacctgaacttttacaaaccgatccttgttactttggcatacgatttgtagaacagttaatgcagctcgaaagagaaaagcaagtacaggaaaataataacaattaaaataatagaaaattatgggaaaaattatcggaatcgacttaggaacaaccaactcttgtgttgccgtactggaaggtaacgaaccggttgtaattgcaaacagcgaaggtaaaagaacgactccttcaatcgttgcattcgttgaaggtggtgaacgtaaggttggtgatcctgcaaaacgtcaggctatcacaaacccggaaaaaacaatattctctatcaaacgtttcatgggtgaaacctatgatcaggttcagaaagaaattggtcgagtaccttataaagtagtccgcggtgacaacaacacaccacgtgtcgatatcgaaggacgcctttatactcctcaggaaatttctgcaatggtacttcagaagatgaagaaaacagctgaagactatttaggacaggaagtaacggaagccgttatcaccgttccggcatactttagcgacgcacagcgtcaagcgactaaggaagcgggtgaaattgcaggcttgaacgttcgccgtatcgtaaacgaaccgactgccgcatctttggcttacggtttggacaaaacgaacaaagacatgaagatcgccgtattcgacttgggtggcggtacattcgatatttctatcttggaattaggagacggtgtgtttgaagtaaaatccacaaacggtgacactcacttgggtggtgacgacttcgaccatgtgatcatcgactggttggctgaagagttcctgcgcgaagaaggcgtcgacctgcgtaaagatccgatggctttgcaacgtttgaaagaagcggccgaaaaagctaagatcgaattgtcaagcacgacaagcacggagatcaacctgccgtatatcatgccggtaaacggtgttccaaagcacttggtcaagacactgacacgtgcaaaattcgaacagcttgcagacagtctgatccaggcttgtatcgaaccatgccgtcagtctttgaaagatgcaggtttgagcacttccgacattgacgaagtcatccttgtaggtggttcgacacgtattccggctgtacaggccatcgttgagaagttcttcggcaaggctccgtcaaaaggtgttaacccggacgaagtggtagctgtaggtgctgctatccaggggggggtattgacaggtgaagtaaaagacgttctgttgctcgatgttactccgttgtcactgggtatcgaaacaatgggtggtgtaatgaccaagctgatcgaagccaatacgactattcctaccaagaagtctgaaacattcacgactgccgttgacaaccagccttctgtagaaatccacgtattgcagggcgaacgttcactggctaaagacaacaaatcgatcggccgtttccacctcgacggaattccagccgcacagcgtggcgttcctcagatcgaagttactttcgatatcgatgcaaacggtatcttgaacgtatcggctaaagacaaaggaaccggcaaagtacagagcatccgtatcgaggcttccagcggcttgagcgacgacgaagtaaaacgtatgaaagaagaagctcaggctaatgccgaagcagacaagaaggaaaaagaacgcatcgacaaactgaaccaggccgacagcatgatcttccagaccgaaaaacagttgaaggatctaggcgacaaactcccggctgacaagaaggctcctatcgaaacagccctgaacaagctgaaagaagctcacaaggctcaggatatcgctggtatcgatgcagctatggcagaactgaacagcgtattccaggcagcaagccaggaaatgtacaatgcccagaacgcccaaggtggcgcacaaccgggtcctgacttcggtcagcaggctggtggcaacgccggcaacaacaagcaggatggtggtgtaacggatgttgactttgaggaagtgaaataaacatatattttcacataacacaaaaaagcgattgccggttatttccgacaatcgcttttttgtgttcaaatccgaaatcctatcagggaaatatcacttgatctcaaacgtatccgcgtccttccatgcaggaaacttcccccttagatcttccaggtctgcacgggtaagcgtacatgtgcgagtgacctcctcacgcttgccggcatccgccagctttttccctttcggagagaagatcatggaatcgccccggtaaacaaagcccttaccgtcgatccctacccggttcaccccgcagacatacgccatattttccattgcacgtgcctggagcaacgtcttccatacttttttacgcgcctcgggccagttggcgacatagatcaacagatcgtattcgttgtccacgttccggctccaaaccgggaaacgaagatcataacaaacttgcaaacagatattccagtccttataccgtacgatcgtccgtttatccccggctgtgaaatgctggtcttcgcccgccatccggaacaaatgtcgcttgtcatacaaataagtttcaccttcgggcgtgacgaaaaaagcacggttgaaatatttcccgccttcttttgcaatgaaactacctgccacagcaagcttatatttcttcgcccacctctttatagtaggaatagtaggcccgtccatcgtgtcggccagcttttccacatccatagaaaaacccgttgtaaacgtttccggcaaaacggctatgtccgtcttaccgctgacccgtcggagcagttctccataataacccagattttcatctctgtcctcccaaataatatgagactggaccatactgatacgcaaattgtctgccatgatattaaatttgaacaaagttttccgggtgacaagctgtcactcctctgtaatgctcacggatatcacggatatctttatccgcatcacccgtaggatagaatacccctttaaaaccggcctctttctttttgtaatcgaaataagccatcaggataggcacgttggctttctgtgcgatatagtaaaatcccttcttccagtcattcacccgtttgcgtgtaccttcaggagttacggccagctggaattctttccgccgattgaactggccaaccatctgatccgtcaccgaagtccgcttactgcggtcaacaggcactccgcctaaccagtcaaacaacaggttgaacggaaaaaagaaccattcctttttaatcaggaaactggcgttacggccaatcgaggtataaaacagttttcctacgataaaatcccaattgctggtatgcggagccacacatatcacacatttaggcacatcctccactaccggcccaagtttccagccggccaagcgaagaagtgccttacttatagctttcttcattctttactttctatttgctcaactctccgatttcagttgctattgcatttatttccgtttgcaggtccgcccgcaatttacaataatattctttcacccgtttcttgttttcttttccgtccggacggttggcacggcgaataaattcatcttgcatatcaagtactctcgccatcaccacgtcggctttctccgaattgacacccggaagatacagcttacaaaacaaagcttccgaaaacaaatcgccagccacatagctgatgtctctctttaaaattcttcttttagccatagttgtttacattaaaatatctacaaatctacataattcattcattaaacaaaccctatagttgaaaaaaagacaaaaattcgtatctttgtcaccctaaaatatctgattataaacaaaatcgtttatggataatacaacaacaacgccagaatatcttttcgagagcagttgggaagtatgtaataaagttggcggtatctataccgtcctttcaacaaaagcgcatacgttgcaacgatcgtttaaagataagctgatctttataggacccgatgtgtggaccgatacaaacgctcccgactttattgaagatgatgttctgtttgctgactggaaaacttatacgaagaccacagaaaatctgaaagtgaaagtaggccgatggaatgtcccggggacacctcccgtaatcttagtggatttcaaacctttcttcaaagaaaaagattcctttttcttctcgatgtgggaaagtttccgagtggattcgatccatgcgtacggtgactacgacgagtcttgtatcttcgcttacgcggtaggtaaggtcatcgaaagtttttatcatttttacaagctggaaaacaaaaaggttgccgctctgttcaatgaatggatgctgggaatgggtgcgctctacatcaaaaaacaactccccgccgtcgcaacgctcttcacgacacacgccacatctatcggccgttccatcgccggaaacaacaaagccctgtatgcgtatatggatggctacaacggcgaccagatggccggggagctgaatatggaggcgaaacattcgttggaaaaacagacagccttgcatgtggactgctttactaccgtgagcgacatcactgcccgcgagtgtaaacaattgctggacaaagcaccggacatcgtcacgccgaacggcttcgagcccaacttcgtcccgtccgacaaagaatacgacaagaagcgtatggcagcccgccgcgacctgctcaacgtcgcagagaaactgctcggatgccccatctcaccggatgctttcctggtttcaaccagcggtcgctacgaataccgcaataaaggtatcgacgtctttatcgaagcaatgaaccgggtacgcacttccggcagactccagcgcgaagtcgtcgccttcatcatggttccggcttgggtacgcgatgcacgtgcagacctgaaagaagtcattgacaagaacatacgcaccacctcccccatgcaaatgccattcgtcacgcattggctgaatcagatggaacaggacaaggtgctgaactatatctcccatgccggcttcaccaattcagcgaccgacaagctgaagatcatttttgttccttgctacctggacggacgcgacggtatcctcaacaaaccctactacgatctgctgatcggtatggatgcgaccgtctatccctcctactacgaaccctggggatacactccgctggaaagtatcgcattcgggattccgaccattaccaccgatcttgcaggtttcggtctatgggctaagaagcatgtgacaggcaacaacataagtgaaggcgtagccgtcgtgaaccgtgacgattttaattatttcgaagtagcagatgccatcacgtcttcgatcctggcacttgcaggaaaggacaaaaaggaaacggcagagatccggaaacgcagtttctgcctggctgcaaaagcagaatggagcaaattcattgtctactatgaagaggctttcagaatcgctttggagcatgcaagcaaaagaaataattaaaatacgctcataattaaacagataatctctatctttgcaacgttttaggcaaaaaagagatgatacaatattaaaatataaattgaaacattttaaacttcacaataatgaaaatcaaagcgaataacgcaaacagcccgatttggaaagatgtttattctcattctatgcttcccgaacaattacagccgttatacgaaatggctacaaacctatggtgggtatggaaccatgaaggagccaaattattcggtaagatcgattctgaactttgggcatcaactgaaggtaacccagtacttttacttcaaagtttatcctacaaacgtattgaggaaattctggcagatgatgtcctgatggccgaaatcaaagctgtttactcaatattcaaggattatgtaaatgttaagccggatcagacaaaaccatctgttgcctatttcagcatggaatatggtttgaccaacgtgttgaaaatctattccggcggcctgggtgtactggctggtgactatttgaaagaagccagcgacagcaacatcgacctgacagcagtaggtttcttgtatcgctacggttactttacccagtctctgtctatggacggacaacagattgccaattacgaaccgcaaaacttcaacgcactgccccttactcaggtgatgcaggctaacggcgaaccgatggtattggaggttccttaccccggccgcaccgtttatgcgcacatctggaaagtaagcgtcggacgcgttcctctatatttgatggatacagatattccccagaacagcgaatgggatcgctccatcactcaccagctgtatggcggcgattgggaaaaccgtatgaaacaggaatatctgctgggtatcggtggtatcttgatgctgaacaaattaggaatcaagaaacagatttatcactgcaacgaaggacacgccgcactgatcaacgcgcagcgtctggtagacttcatccagaacgacggtctgtcattcaaccaagcattggaagtcgtacgcgcttccgccctatacaccgtccacacaccggttccggctggtcacgactacttcgatgaaggcctgttcggccgttatatgggtgaattccccggcaagttaggtatcagctggcaggaatttatcgacatgggacgtgaaaatccaggttccaacgagaagttctccatgagtgtattcgctttgaacacttgccaggaagcaaacggcgtaagctggttacatggaaaagtatcccagcgcatgttcgctccggtatggaaaggctacttccccgatgagctgcacgtaggatatgtgaccaacggcgtacatatgccgacttgggcttctaccgaatggaaacgtttctttgcagaacatttcgacaagaagttcttcaaagaccagtccaacaagaaatactgggaggcgatccagaatgttgccgacgaagaaatttggtctatccgcaagacattgaagaacaaactgattacatatatcaagaatcaatacaagacaaactggctgaaaaaccaaggagatcctgcaaaggttgtctctatcctggacaaaatcaacccgaacgccctgctgatcggtttcggccgccgtttcgcaacttacaaacgtgcccacctgctgttcacagacctggaccgcctggccaagatcgtaaacaacgaacaatatccgatccagttcgtattcaccggtaaagcccacccggccgatggtggcggacagggcttgatcaaacatattgtcgagatttcccgccgtccggaattcttaggaaagatcatcttcctggaaaactacgatatgcgtctggctcgtcacctgatcgcaggtgtcgatgtttggttgaacactccgacccgtcctctggaggcatccggtacatccggcgaaaaagcagagatgaacggtgtcctgaacttctccgtattggacggatggtggtatgaaggttataaacagggtgcaggttgggcattgaccgacaagcgtacttacgaaaaccagcagtatcaggatcagctggatgccgctactatctaccacatactggaaacagagattatcccgacttactatgcaagaaacagcaagggttactctcccgaatggatccagtacatcaagaattcgatgtccgaaatcgctcccgactatacgatgaaacgtatgttggacgactatatcgaccgcttctacaacaagttggcaacccgttccgctcacttgcacgaaaacggctttgccgaagccaaagcaatcgctgcctggaaagaagaagtggcagaacattgggatagcttccaggtagaatcgtttacatgcagccaggacttggctatcgacggtccggttgtcggtaaagaatataacttcaatctggttatcgaccgccatgaactgaaaggtatgttgggagtagaaatggttgtcacgaaagaaaatccggataaccatcagttggaattactggcgacagaacaattcaagctgataaaagaagaaggttccaaactgttcttcgaactgaaaacagcttcaagcgaagcaggccttcacaagatgggcttccgcgtttaccctgtgaacaaagaattgcctcatcgcatggacttcgctttcgtccgctggatccagttgtaatcaagacaagcaaaacaataattaagaaagagggtgtgcatgacacatcctctttttttatgcagatactaaagctatgctttacagtggctaaccctatgagttacgagcactaaccaatagggttacggacaccgaccaatagagccccatattgtccgcttgaaagacagaaaatcaaaaaagggaagtcgcacgacaggcaacttcccttttcaagctgatatagatttttttaggtttagaaagcgtaatccaaacttaagccaaacactttattggtacggctatagacattcgtaccggggagatttgtaccgcaataattctccgatttctttgtataatcatgataatttgtccacatataccccacattcaatgccatcttttcgctcagcatcaccttagcaccaaagcccaacgaataagagtcacaggagaaactaacatcgctttggaaattatcagacaaaccataatccgtaatttgagcgccaccactaatggtcaatctcttgatcacgtcccattcaataccaaatagatactcattcgtacctctttccaattctttctgttttccaccggccatgcccgctttcttgtcatcaaagaaatgatactctacagaagccttcaacatgggtaaaaactgataagaggctgccaccgaaagcatggaaggaatatcgttcggcgtattcacaccgtgcttgtaagggccgatcaagtcttccgcactatcaggataatccaacttcttggtattgttttcgatgttcaagttcgtcttaaactcatatttagccccgaaattgaatttaccgtatttaacatcaacccccaaaaccggtgtcagcccccaacctgtctgatcgcaatccaaagccaaattcatcaagtctgttccaccaaaatcctttttcagcttcgcatccagatacccgtcatagtttcctgaaaaatagttcatccgacctccggcaaaggcagaaagccaatccgtgatcttatatgacaagccaagttgcagagaataaatatactgttttccgtccatcgcactgttaatagtatacatatccggcgtaacgatgggacttttaccgcccgtctttatatacttccccagactttcctgaaatataccagccatagctgccgattcgaacatcggcaggccatcgtcaaacgatgccttaccgcccccacccgtaatggcaaagaaaccggagatgatccaatcaccttttttgtaagccgcaaaaacactcggaatcacaggagcggccgcctttcctttgtaatattttttatagggaacatcgcttactgtcggcactttatttaccgggtcgaaaccattatatgtaccaaaagaggcatctatatccctagtctggaaagcactttggatactcacaccgacacggaaaccgtctgtcggcaagaaagaaagacccgccgggttagacaaagcaccatctatatcaattgcagcacctcgcgaaagtgaccttaaaaaggctgcatgctgattcgtattcgtcaaatatccaccagcgaaagaaaccaaaggcatcatcatcaatgccgcacctactactacttttttcttcatgttttacttttcttaattacaaaacggcggcaaagataaatacttttttcaaacattgcacacttttaatgaaaatgtgccgcacaaaatcacacatattgtgcaatatatattcttcccaattgtcaacaatcaattgtcaattgtcaacaaaaaaggtatctttgcacccgaaaaggaatgtctccttttccgtgtgcttgctaaaccacgtactaaaaacaagaaagatatgaaacataaaaaagaagccgctttggtatgcttctctggtggacaagattccacgacctgcctgttctgggccaagaagcacttttctcgcgtagaagccgtatgttttacatacgggcaaaaacattccctggaaatagaggttgcacgaaaaattgcagccgatgccgacgtccccttccaactgttggacgtgtcgttgatcagccagctcgacccgaactgttcgctgacaaacaccggcatttcaatggatcaggaaaaaccggcagacagctacccgaacaccttcgttccgggacgtaacatggtattcctgaccttcgcagcgatcctggcacgcagcaaaggaatcttcaacttggtaaccggagtgtcggaagccgatttcagcggttatcccgattgccgcgatacattcgtccgctccctcaacgtcaccctgaacctggcgatggacgaacggttcgtgatccacacgcccctgatggaccgggacaaaagcgaagtgtgggaacttgcggacgaattaggagtcttcgaccttgtacggacccagaccctcacctgctacaacggcatcatggcagaaggctgcggccattgtcccgcctgcaaactgcgccgcgaaggtttggagaaatatttaaaaagacgccgataaaccatcgtttacaagaataacaaaaagacatcatggatacaagaaaagatgaaaacgaactacatctgttaggcggttcaaccgtatacaaacaggattatgccccggaagtactggaagcgtttacaaacaagcatccggacaatgattactgggtacgcttcaactgtccggaatttacaagcctctgtccgatcaccggccagccggactttgcaaccatctacatcgattatattcccgatataaaaatggtggaaagcaagagcttgaaattatatctgttcagtttccgcaaccacggggctttccatgaggattgtgtcaatatcatcatgaaagaccttatccgcctgatgaaccccaaatacatcgaagtaaccggtatcttcactccgcgcggcggaatcagcatttacccgtattgcaattacggccggccgggcactaaatatgagaagctggcagaacaacggcttttcaaccatcatgcgaaataaaaaagcacgcacagcttttccattaaccagccaattagatgtaagcgtattttatcctcgacaacgccgggaaccgaatacacttacatctattttttatttcttaatttcctgttttcgattttatagtcttaattaatccattacctttgcaagcaataaattctaaacctatatataaaacaatttagaccatgaacaaaagcattacaatgaagactgctttggcagcattggcttgtacagcttgtgtcagtgcaagcgcgcaaaaacagtaccccgaacaggaaaaaatgaaaccgggaatgtctgaatactggactccgcaaccgaaagtagtcactccgggtgacatcaagacaaacagcgccccttccgatgccatcgtcctgtttgacggaaaagacctttccgcttggcaaaacgctaagggcggccccgccgaatggatcgtaaaagacggcgttttcactgtagacaagaagaaaggcgacatcctgacaaaacagaaattcgagaacttccagttgcatatcgaatggtgcgtaccggaaaacatcaccggcacaagccaaggacgcggcaacagcggcatcttcctgcaagacatgtatgaaatccaggtgctggattgctataacaacgagacatacgtgaacggacagaccggcagcgtctacaaacaaacgcctcctctggcaaatgccatgcgcaagccgggtgaatggaatgtttacgatattatctattccgctcctatcttcaaggaagacggtacttatcgtgttccgccgcgtgttacggttatccagaatggcatcgtattgcagaataacacgactatcctgggtacaacggaatatatcggtttcccgaaagtcgtaaaacacggagcaggcccgatccgtttgcagtctcatggcgaccccagcgaaccgatcagcttccgtaatatttggatcagggaaatgtaaattcaggtgaaaggtgaaaggtgaaagttaaaaagaaatataaatcaaacttttaacttttaactttcaactttcacctttcaactatttagtcgagtgtcagattaaactcatccttcaactttgccaaaaccggatttatgttcagtaggtgttcatacttctctgccgacgtataggccaaatgcttctggttcgtttcatctatacggacacgcatctgaatacgggtattcttcaactgcatccgcaaataactcaatatatcgatacaattattcgtcaactcatcctgttggccggggttatgcacacagacttcaaaataataattatcctgcaaggccggcttgcaattgatcatcgtatttttcagatataccttcttgtcgatagcggaagcatacgcatcccaataatgaaccaatgcttcctggctgaaaggactttgcatttcctgtaccacggtagcagtctgtgtcacagcctgcgctttcggatgctctacgccaatctccttaatggatgtaccgaactggggcggacgcgccactctcttgggagccgatgccggaggggcctgcggaataagagtcggagaaggcggcacatgagtggaaacgacctgctggcggggagtcgctccggtcatttcctgcggagattgtaccggacgttgcaaaggaggggcagattgtacggtatacgtctgctgagccgccacagcctggcctgcttgagcaggggcctggcccggcccgttggatgctatcggctcaatcagccctttttttttatcatcggccggttgtccgacactgcttaactgacaaagctggataagcgtaagttccaacaacaggcgcttattccggctggcccggtaattcaggtcacaggtatttgccagctcgatcgccttgaacaacaacccgtcggaacagcgcttcgccatctccttataacgttcacggatagaagcgccgacctcgaacaggatcaaagtagcctcatccttgcagaccagcaaatcacggaaatgcgatgccaggccggttatgatattctgcccgtcaaatcctttgctcaatatatcgttcaagatcaggatggcagaccggacatttccggaaagcattgcatccgtcaaccggaaataatattcgtaatccaggacgttcaggttatcgataacagcctgataggtaatattcccatttgtaaaactgactacctggtcgaagatggacaacgcgtcgcgcataccgccatccgctttctgggcaatcacattcagggcttccggttcagccgtcactccttcgcaggaagatacgtattccagatgctccaccatatcggcaatcgagatacgcgaaaagtcgtatatctggcaacgggacaggatggtcggcaacaccttatgcttctccgtcgtagccagaatgaacaaagcatgatggggcggttcctccaatgttttcagaaatgcattgaaagccgccgaactcaacatatgcacctcatcaataataaagaccttgtattttccgattggaggcggaatgcgcacctggtcgatcagggcacggatgtcatcgaccgagttgttggaggcggcatcgagttcatggatattataagaacgctgctcgttgaaggccttgcaggattcgcattcgttacaggcttccccgtcggcagtcggattcagacaattgatcgtcttggcaaagatacgggcacaagaagtcttgcccactccacggggaccgcaaaagaggtaggcatgagccagcttgttactctgtattgcattcttaagtgtagttgtcaaggacttctgtcctaccacactacgaaaagtagaaggacggtatttccttgccgatacaatataattatccattctctgcttttttattaacaagacaaagataaacaaaataattcatttacctttgcaaaaacgaagttcctatgtcacgcataaaagacttttacaacaagtatctatccaggatcaatgcctactggctggtaaccatcgtgttcttcgccctgacattcgtaatgggcgatagcagtctgtacaagcgttatacatacgatgaaaagattcgtagcctggaaaaggaaatcaagcattaccagaaggagatcgaaatcaacagcaaaaagctgaacgatctgcatacggataaggaaggactcgaacgcttcgcccgtgaagaatatttcatgaaaaagccgaacgaggatgtatatattattaagaacaaataaatgaacgaaaaagcaagaacgatcgttttcaatatctccgccctgctgttgctcgccggtgcgggattatatctggcattgccggttgcagctccttacctgttcgccgtcggggctgccggtatagcggtcagttacctgacaatgcctacccaagatatgaattttcgcaggcgcagattgcaccgctacaacatatttgccgggttgctgtgtatattcgcctccgccctgatgttcagcggacggaaagaatggatgatttgcctgactatttcagccctgcttcagttatacacggcatttgtcacccctaaaaaagaaaactaaaaacgaaaaatacctacatatagttagacgtattgtctaaattacaattacagggacaataaaattacctaaaatccgcgattgatgcgctttctatttataaggaactttgcagcgttttattaacgatacaaaactctttataaattgaaagcgactattctaaaaatttccggtttattcatattcctcttggctgtaatatccgcctctgctcaggacagggcgatgatctcaggtaaaatcatatccacggaaaaagaaaccgttgatttcgcaacggtctacctgaaaggtaccacatacggcggaacaaccaacgaacaaggtatttaccatctgaaagctccggctggcgactacacgttagtcgtatctgccatcggttacaagactgttgagaaaccggtgaaacttaccggtggagaaaggaccagacagaatatcaccattactccgcaatcgacggagctggacgaagtggtcgttgtctcaaacggaataagccgtttgaaacgttcggcattcaatgccgtagcactcgatacgaaagaactgcaaaattccaacaaaagcctgagcgaggcactggcgaaagctccgggaatgaaggttcgtgaatccgggggtgtcggttcggacatgcaacttacgctggacggtttcagtggcaagcacgtgaaaatatttatcgacggtgtgccgcaggaaggtgtgggaagttcgttcgggctgaacaacatcccggttaactttgccgaacgcatcgaaatctacaaaggcgtggtcccagtaggcttcggtacggatgcaatcggaggcgtgatcaacatcatcactaaaaagaagcgggacagatggtttttagatgcctcctattcctatggctctttcaatacgcacaagtcttacgtgaatttcggacagacgttcaaaaacggattcacctacgaaatcaatgctttccaaaactattcggacaatgattactacgtgaacgctccggtggaaaacttcgagaccggaagcatcgacagaagcaagaaggaacgggtgaaacgtttcaacgatacctaccacaatgaagccgtcatcggcaaactggggatcgtagacaagaaatgggcggaccgcctgttgctgggtttcacctattcgaatatgtatcaggacatacagaccggtgtgcgccaggaaatcgtttacgggcaaaaacaccgcaaaggacactctctgatgccctcattggaatatggcaaacgcgatctgttcataaaagggctggacatcgtgctgactgccaactacaataaaaacctgacaaccaacgtagacacttcttcttatgaatacaactggcgtggagaaaagcacctgatgaactccgccggagaacagtcaagacagcattcacgggcagacaacaataactggaacggcacattgacactcaattaccgggtcggtaaaatgcatacatttaccttcaatcatgtgttgaacactttccatcgctccaatacctccctgcttgcagccgaagagatgaaaagtgccattgccaaagaaacccgtaaaaacatttcaggcctttcctaccggttgatgccgtccgaacactggaacttttccgctttcggaaaatactacaaccaatttgtagcaggcccgatggcaacatcaagcacgcaggacgaatacgtacgcaaaacacgttctgtcaactcattcggatacggggcggccggaacctacttcatcttgacaggcctgcaagccaagctgtcttacgaaaaagcttatcgcctgccgaccatcgaagagatgttcggtgacgaagacctggaaatgggcgaactgagcatccgaccggaaaatagcgacaatataaacctcaacctgagctacaacaagacattcggaaaacataccttgtatgtggaaggtggagtggtctaccgcaatacgaaagattacatacaacgtaacatcacagatttgagtggcggcaagcaagcggcaacctatatcaactacggcaaagtcgagacaaagggatttaatctgtccatccgctacaacttcgcaaactgggtgagcgtaggcggtaactttacccaaatggacgtacgcgacaaaatgaaaacctccattaccagcagtgccgaaaacctggcctatggagaacggatgcctaaccttccctaccggtttgcggattccgacatatcgttctactggcgtaatctttggaaaaaaggcaatgtgctgactgttacttacgacaatcaatacctgcatagctttacttactattcgtctgctatcggatcgaaaaacaatgactatgtcgtaccgaatcagttctcccataatctaactctttcctacagccttcagaacggacggtacaacgtgtcgttagagtgccgcaactttacaaacgaaaacttgtacgataattttagtttgcagaaagccggacgcgctttctacggtaaagtaagagtttatttcggaaattaattcaattatcacagttactaaatataaatacatttattgcaagatgaaaaagaatcatttattaaccggtattgccgcagttatgctgacgggtggactgtttacttcctgtagtgacaacgatatcccggcaccagacgaaggagggaaaggcgaaatcaaaaacacattcgtaatccctgcttctacaacggcatccggaaatacgaccaacgtactgcttacagccgaaagtgtggacgaagggaccgtcacgacattaaacaacggtcttgtgaatgacggagccacacaatgggttttctataaagaccggtatctgtatggcctgacctacaatcagggaaatgccggagacacacgctcgtatatcctgaatgcagacggagaacttgaaacccgctcacaaagctataaagtcaaacgatttacgacttacggcatttatgacaagtatatcatgactctttcttcgggtgacggtccgacggaatgggcggacgagaacggctacgtcccccaatcattcctggtctcccttttagatgtcgcagccgagacaaaaacggacaacgacacgaagaacaaagcctacctgtccgaaaactttctgggcaatggcgaatatgtaacgctggcaggtatcttggaacataacagcaagatctatagcgtagccgtaccgatgggattaagccagtatgggacaaaagacggaaacgggaaatggattctgccgggtaacgaagacttagtgaaaaccgaatccggtggttcgaacagtagcgcttacgaaaaagacgagctattgtggacacagtatccgaactcctgttgggtcgccatcttcgacgatgaaacatttacaaataagaaaatcatcaagactgataaaatcagttacgcttgcggccgtttcaaatcgcaatattaccaaatgatttgggccgccgataatggcgacatctatgtattctcaccatcatatgccaaaacgatgaccgacccgcgccaacagaccaacttgccggccggtgtggtgcgcatcccgaacggaagcgaagatttcgacgattactactgcaacctggaggcacagagcaacggcaactccttccttcgcagctggcatataacagaagattatttcttgttgctgatgtatgaccgtcctttcagtgaaacaggctatacagccaatcagttggccgtattcaaagccggagccgaaaaattgacttacgtgagcggacttccttcaaccgatataatttccggtttcggaaacacgatacatgttgaaaacggcaaggcttacatcgctgtaacgacaaccgacgggaacccagcaatctacaagatcgacccggttaacgccaatgctacaaaaggtgtaacagtcgaagcaacccaaataaccggtatcggcaagttggcggctgcaacttcacagaactaacaaccaacaatgattagaattcaattctttctgatattcctcctgctcccgctgaccatgcggagccaggaggatatttgtatcgggaaacgatactcactctactctgcctttttacaggaggaacgggactattggatatatctgcctcaaaactacgatcgggatacgacacagaattatcccgtcatctatctactcgacggaggttcttttttccattcattggtcggtatcagccaaacgctctctacggtcaaaggaaaatatcttccgtcctgcatcatcgccggggtaataagcacggaccggacacgcgactttactcctacggcctctgctgccggacgaagcgggaaaacctctccgggcgctattccacaaggtggtggaagtgaaacattcagccgtttcctaacggaagaacttcgttccgtaatcgacagtacataccggacaaacggactaaacatgttaatcgggcactcctattccgggctttttaccgtaaacacgtttttgcgccatacggaattattcgatatctatttagccctcgaccccagcctgtggtgggaccagggaaagctggcagaagaagccgcctcgcttatccaaggtaaggattttacagggaagagcctgtatatcggtgttgcttcccaaaaacggactgaccgggtggatattcacctcaacaaggtcaactatctcctatcggagatattaccgcaagctcaaaaactgcaattttttagtaaatcatttcccgaagaaaatcacggaacggtcgcaattccgggaatatacgacgggataaaacaattattcggaaaatgaaaaagttctttgcgaaaatacatttatggttatcgataccttttggtatcatcatcgcgatcgtctgcctgacaggagcaatcctggtattcgaaacggaaatactggagttttgctatccttcccgctattttgtcaaagagataaaaagcgaaccactttcgccggcggtgctcatgggcgccgccgaccagcaacttcccgactccatcaaaataaacgggatacgggtttcctccgaccccaaacggacctaccaactgattttacccggaaaaaaggctgcttgctttatcaatccctacaccggagaaattaccggcatagacgatggaaaagggttcttcatgaagataatgcgccttcaccgttggctgttggacgaatataaacgggatggaagtttcgcttggggtaaaactattgtcggatattcaaccctggtactggccattattatcataagtggtcttgtcatctggtatccgagaaacaggaaagcactgaaaaaccggctcaaaatcaaaacaaaagccggctggttccgcttcctgtacgatctacatgtctccggaggtttctatgcagctttacttttgcttatcctggcattgactggtctaacctggtcgttcggttggtatcgtgacgcgttctataccgcgttcggcatcagcacaacatctaaacagacgcacgctccgacatctgccgtccccccaaaaacagcaggtgaaagaggttcgaagaaacatcccaaaaccgattacacacaatgggccgaagtcttggccgatttacaaagccgttatccggaatataaatcgatctccatccaagacggatcggcaaccgtttctaccgctgcctatggaaatacaagaggaagcgaccgttattcctttgactcggctaccggtaagatcactgaaattcaattatacaaggacctccctaaatccgccaaaataagaggatggatctattccgttcatgccggaacatggggaggattgacaacccggatattaagctgtctggtttcgctcttaggggctgtctttgccataaccggttactatttctggatcaagaagaaactccggaagtccaaacaaaggtaaacaagaacaagcatgcttcgcttgccgtaaagcatagctttgcaatagctaaagcatagggttacaatagctaaagcatagggttacaaggtctaatgcatagcattatcccccccaaggaatccttagggccacaatcaagaagggctgcccctgcgggacagccctttcgtatatatctatatgttttattccttatttaccggaagagtagttcttattcagcacttcgagaaattcggcagtgatgtcgtatgccggattagataacaaaatattgtcacccattgtattgctgaaaatgatctgatagccttttgtctggttgaaagtcgtcaactgggcgacgatcgtatcgcgaagctgtccgttcagttccatctgcttggcagccaactcttgttctttcttagccgcatagttctgaagttcctcctgctttttctgcaaacggtttccttcctgctgcgctctttccgtagtaaggaaagcattggcttcatatttacgttgaaaatcatttaattctgtccgtaaggcatttgaccgctgagtcatatctaaacgatagtcttcctgcatcttgagaatacgttcattcaaatctttcgaatagttgtaattcgataaaagagagtctacatttacatatgctacagggagcagattggtagaatctccctccgttgtgaaagccggagctactgtggattcttttttactggaaaactgcataacaaacaggattatgacagctaccgcgagcacaccattaataacgtagttaatgttcttcataaagtgtaaattaaatctttattttattcttctatttcttttattttatcatatagattcttccgcaaactatctctcttatgctgggttttagcacagcatatacctttctcccttagtgccgcattaccttcaatgtgtgtattcggaaacttccctccctttttgaaaatcacttttacactgagcaacacaacacaaataacaagaattatgacagtaatcaataacgttgtaagcattttctctatatttgtggacgcaaatataagagtttaagtgattggaaagtatgtttttgatatttaattgtactttttttcatacaaccccctgtttgcagtggtattattaactatagagtaacatctataatacattgtaacattatgaagattactgatttaaagcctgaaatcgtctggaagttcttccaccaggtaacacaagtgccccgtccttcaaagaaggagggaaaaatgatcgagtttcttgaatcattcgccaaacagtataaaatagcgatcaaaaaagatgccgtaggcaacatcctgatgtctaaaccggctactcccggcaaagaaaacctgccgacagtcgttttgcaatcccacatggacatggtctgcgaaaagaataatggaaccgcacatgatttcgaccatgatccgatcgaaacaatcgtcgacgggaactggcttcgcgccaacggtacgactctgggtgccgacaatggcatcggtgtagccgccgaactggcgatcctcgcgtccgatgatatcgagcacggaccgatcgaatgccttttcaccgtagatgaagaaaccgggctgaccggagccaaagcactcgaaaaaggattcatgacaggcgatatcctgctgaacctcgatagcgaagacgaaggtgaaatctttatgggatgcgcaggcggcaaagatacgcaagcggtgttccattacgaaccacgtgacaccaatccgaacatgcaatacttcaaaatcgaagtgaaaggcttgaacggcggacattccggtggcgaaatacacaaagggttgggcaatgccaacaagattctggtgcgctacctgtacctgttgaaaaatcaagccgatttcaacctttgcttcatccacggcggtaacctccgcaacgctatcgcccgcgaagcgcaagcgaccatcggtctgtatccggaagaaaaggaagcagcccgtattctgctgaaccatttcacggcagatatcgaaaacgaactgaaacatgtagacccgaacgtacagataacaatggcatcgaccgaccgtccggacaaatacatcagcgactatgatgccgaaaaactgattttggctttacatgcctgcccgcatggcgtgatcggcatgagccacgacatcgaagggctggtggaaacctccaccaacctggcttctgtcaagatgggagatgacagcacaatcattgtcggcacaagccagcgcagctccatcgagtcttgcaagaacatgattgccaaccaggtcgcatctgttttcaagttagccggtgcacaggtaactcacggcgacggctatccgggttgggcgcctaacccggattcaaagatcctgaaagtggcacaagagacctataaacgtttgtttaacaaagatgcaaaaataatggcgatccatgcaggactggaatgcggcttgttcctagaaaaatatccgaatctggatatgatctcattcggaccgacgcttcgggatgtccattcccccaacgaacgcatacagattgataccgttggattgtggtggtctcacttactcgaactattaaagaacatccctgcaaaataaaacgatacatttctcgttataaaagaggattaacattcaacagatgtttttcctctttttttatgttaatgcccgaaaacttatttataataaatttgttttcttattgacattatatggtaaataacagtttacctggactattaataattaatgaaatgaaaaaattagccgctccgttactcatattattctttatagtgctcaacctgttgtcgtgtgacgggctggacgaaaactattcgaataaccccaaccatcggctgagcttctcggtcgacacactttctttcgatacggtattcaccacaataggctccgcaaccaaagagttcatgatctataaccgcaatgaccaacctttgctgatcagcgagatcatgctggcaagcggtgaagaaaccggtttccgcatcaatgtggacgggcgtaaaggcgaccatttccaggatgtaaggatacaggcggacgacagtttgtatgtttttgtggaagtgaccgtcaatccgaacgcatccaaccagccgctgctggtagacgattccatcatcttcaccacaaacggagtcaaacagtctgtccgcctcgaagcatacgggcaaaatgtaaacctgtataaaaacgggcttatcctgacacaagacacgcattttacagccgaacggccctaccttatatatgacagtctggttatttctcccaacatcacgctcaacatcgatccgggcgcaacgttctatatgcacgacacagcgaaagtcatcacatacgggacattgctggccaaagggacacgcgaaaatccgattgtcttccgcggagaccgtctggatttcatactgaacgacatcctgccctacgaccggacaccatcacaatggggagggattttcttccgtccggaaagctaccataacattatggacaatgtcatcgtgcgaaacggaaaaacaggactgacattcgaaaagtcgtcaccggacgaatccaaactgaaactaagcaattcccaaatcacgaatatgggagagcacctattctctgcacgcaattgcaagattgaagtgaccaacacggaattgaccaatgccggaggaggtgtcgtggttctgattggcgggaactactgtttcgtccattgtacgcttgccaatttcatgacattggaaaaacggaccacgccttgcctcacgatggcaaacaatgcgaatgaagaggcttatccgctcaaagcgacattcgacaactgcatcatcgacggcagtttcgatgctggcaaagaagcatataaaggagaactcaatctatccgtcgatggtgcggcatcattcgaatacctgttcaaccattgcgtaatcaaaacgaatggcagcaacaatgaccacttcaaagaggtattgttcaccaataccagtccgtcctacaggttaaaaggcggcgaaaaaaacaaataccgttttgatttccgtccggattcgctgacgaccttaggagttgggaaagccgatatcttcgtcacgcagcaatatccggtggaccgctacggcataaaccgcctgacaaacgacggtcccgatatcggagcctacgaattcgtaccgaaagaagatgaaacaaaataaaacgatatggccagaaccttaactatgacgttttttatcctgacattgttttctttgccttcacaagggcaaacagacttccgcgtgatgagctacaacgtcgaaaacctgttcgacacgaaagacgatccgcttacggcggacaatgatttcctcccctccggcaaccgccactggacgtccggacggttttaccataaactacaacaactggcaaaagtcatcacagcagcaggagaatggagcactccggctttgatcggactttgtgaagtcgaaaacgattccgtccttgtccggcttctgaactacactccgctccgtcggcagcattaccgttattgcatgacacacggacaagacacgcgagggattaatgtagcatttctttaccagcgggacaagtttcgctatcagggacacaccgaacatccagtccgttttacccgcaagcagcataaacacacccgtaatatcctgcatgtatggggagatgtaatgaccggagaccggatcgatgtctttgtctgccattttccctcccgttacggaggagaaaaagaaagcgaaccggaccgtttggatgccgcacgtaccctgcgtacattatgcgactcgatccacaacctccgtcctgccccacacatcctgattatgggagattttaatgatacgccggacgacacgagcatccgggaaatactggatgcccatccgattccaaatccatgcctgtccggttcaggttccatgcctatgaaacctcggacgaatgcttatccatctctccttctatacaacctgtttgccaagaaccggtcagttcctcctggaagtcataagtatcaaggggaatggagccagttagatcaaatcatcctgtcgtcctctctcaccgacaccacctcccagatacagctcatcccaggaagcgcccgcatcttttcaccgtcattcctgctcataaaagataaaacctggcgtggcgaacgccctttccgcacctactatggcttcaaatacgaaggtggctacagcgaccatctccctttgatcgtcgactttctactattgaaataaatgattacttttgcttttctaaatacagatagaatatgtacaaactatatatcgccatactgttttttttcatacagacaataagcgcccaacaactccgccagccattcgatttcccgatcttgttgagcggaaacttcggggagctgcgcaacaatcatttccattccggaatagattttaagacacaaggagttgaagggaagcccatccacgccgtacaggacggatacgtatcacgtatatccgtcagtccgtggggatacggaaacggtttatacctgacacatccggacggaacgacaaccgtctacggtcatttgcaacgattcgccccttccatcgcccgatatatcaagacacagcaatacgaacaggaaagcttcaacgtgaacttgttcctcgacccggaccaactcccggtcaaaaaaggagaaattgtcgcctatagcggaaacaccggaagttcgggaggcccgcatctccacttcgaagtacgcgacacggaaagtgaagaggtactcgatcctatcgaatatttcaaagagaagataaccgacacccgcgcaccgaaaatacagggaatcctggtctgcccgcaaccaggcaaaggagtggtcaacggcagcagccgtaaactggagctaaaaccggtcacggccaaaaacggcaaacaaaccatcaccggtaagatcgaagcttggggagaaatcgggcttgcggtcaaagcctacgattatatggataatacgacaaatatctacggagtgaaggatattaccctccgccaagacagccagatcatctaccatagcaacctgaaccgctttgctttcgacgagacccgttacttgaacagctatgtcgattatgaggaatggaaagagcgtcgctccttttatatgcgcagcttcgtagaaccaggtaaccgcctccgttttaacgaaagcatcaaccggggaatcatccatatagaagaagagaaaacgtatcatctcacgtatacgctcgccgatgcattcggcaacacaactcgcctctccgtttggatagaagggaaagaacaggagattccagagatcgagaccgaaggtacagagctgtttcattggatggccgacaaccgcttcggagcaaaaggtatccggatgacgatcccgaaaggaaacctgtacgacgatctctatttccgttactcggtaaaggaagacagtacggcattggcagacacgcatatcctgcataaccaccccgttccgcttcacagctcggcccaactatctttgcgtttacggatcgacacgctggaaaacaagcagcaatatggtatcatccgcactcagaaaggacgtcgatcctggatcggcggcacttaccggaacggctggatcgacggcacgatcaaagaacttggcaattatacggtcgggcaagatctcaaagcgccgacgatcaccccgttgggcgccaacacatggatcagcaagcaggcattcgttttccgcctgtccgataacctgagcggcgtacaaacctaccggggagaaatagacgggcagtacgtcctgttcgaaatgaacagcaaatcggtcattacctacaagttcgataaagaacggctcgaaaaagggaaacacaccctcaaactaaccgttacggatgcagccggaaaccggtcggaatacaagtattcttttgtctggtaaataaaaagcctgaatcttggaaattatcaatttatttgtacctttgttaatttcaaaatcaggatttctttaaattaaaagcaagacatataggtcatggaaaacaaggaactgttagaaatggtaagaagcaaggcgcaaagctggcttactaaaagttatgacgctgaaacacgtgcacaggtgcaggctctgttagacaacgaagatccgacggaactgatcgaatctttctacaaagatctggaattcggcacaggaggtttgagaggcatcatgggagtaggttcaaaccgtatgaacatctacacggtaggagcagccacacaaggcttatccaactatctgaaaaaggaatttgccgatctggaccagatcaaagttgtcatcggccatgactgccgtaacaacagccgcaaatttgctgaaatctctgccgacattttctcagcaaacggcatcaaggtgtatctgttcgaagaccttcgcccgacccctgaaatgtcatataccatccgcaagttgggatgccagagcggtattatcctgacagcttcgcacaacccgaaagaatataacgggtacaaggcgtattgggacgatggtgcccagatgatcgctccgcatgacaagaatacgattgccgaagtcaataaaatccgtaatgccagcgaaatcaagttcaaaggcaataaggaactgatcgaaatcatcggcaaggaaatcgatgaacaatatatcaacgacctgacaaaaatttctttgtcaccggaatccatcgcacgtcaccatgacatgaagatcgtctacacgccgatccacggaacaggcgtgacggttatcccgccgacattgaaagcattcggtttcacgaatatcatccacgtacccgaacaggacgtagtaagcggcgacttccctaccgttgtttctcctaatccggaagaaccggtggctttggctctggcagttgaaaaggccaaggaaacagacgccgagctggtattggcttccgacccggatgcagaccgagtaggtgcagccgttaagaacaacgaaggcgaatgggtattgctgaacggtaaccagaccgctttgatgttcgtctactatctcatcacccgctggaaagaactcggtaagatcaacggcaaggaatatattgtcaagacaatcgttacgaccgaactgatccgtacgatcgccgagaagaacggtgtcgaagtgtatgacgtttacaccggcttcaaatggatcgccgatgtcatgaagaagaacgaaggaaagaagaactatatcggtggcggtgaagaaagctacggcttcctatgcgaagatttcgttcgcgacaaagatgccgtttctgcttgtgccatcctggctgaaatcgcagcctgggcgaaagaccagggtatcacgatgtaccagttattacagaacatctacgttcagtatggtttctctaaagaaaaaggaatctccgttgtaaagaaaggcaagagcggcgctgaagagattgaagcgatgatgaaacacttccgtgaaaacccgttgcaggaaatcgccggttccaaagttacgttattctacgactacgcttccctgaaaggtaaagactatgttgaaaacgaaacactgacattggatatgccgacaacctccaacgtcctccaatatttcacagaagacggaacgaaagtatctatccgtccttccggcacggagccgaagatcaagttctattgcgaagtccattccaaagtaaagagcctcgacgaactgccggctgccgaaaaagcaggagcagaaaagatcgaagcgataaaggcttcgttaggaatctgatcccggacaaacaataaccgaatataaaaaaggaagagcgcccgttgtttacgatagcgctcttcttttttatttcagatctttcgccccaaaacaaagcggcaacagtgattcggcactctccgccaccacgacctctttcgtaccgcacaacaagaccttcatcggcttgccatagcgttgttccgcctccaacaaaacctggcggcatgcaccgcaaggggaaatgctctcgacctgccggccattcgtggcggctgcaatggcaagagcgacaacaggcatatccggatattgatggccggcatgaaacaatgccactcgctccgcacacagaccggaagggtaagcggcattctcctgattactgccggttacgatcgtgccgtcctccagcaaagctgccgctccgacatgaaacttcgaataaggggcatacgattgtcccgtcgcttttacggccgcctccatcaaccgcgactcttcttccggaagctcggtaagaggatagatccggatttttgtctccaacttgatttctttcatgaaataacactctaaatgatacaagcaaaaataaagaaaatatagagaaagcccaaatacattagtgataaacaatagccatgtttctattgtcaaacagcccattcattaaccttttgcctttagtcgaaaaggctttcgcccttggtcaaaaacactttcgaccaatgtcaaaagccttttcgaccaagggcgaaaggttaaagagtggtagtaatagctgtaaattcctatctttcatttaaatatatagtagtggaaacgaatcagagcgacatggtcaacctaaatcaggacgagataatggtgaaggcaaaatcctgaggtgaaggcagtccggatgtttaccttcacccttgtaccccataacaatcaaaaggtttcaaagacaggtgaagccgaatcggaaatccgcataatccttatttataaatagcatggtgaccaatcatcatttatgatccatatctgcccaattataatgcggcctcccaccccacccccgccacaagactatgacaatgatgtaaaacaaattaattatctttgccgttggataataaaaaaagatgtatctgattgatacacagaatagaattgaagagtttgaaattttaggtaacgatttagcgacattcagaacgctctgaattgctgcggtttacaccatagtttcaaacaactctttcgtatttgcaaaggtacattttttatcccataatgccaaatcattgccaatcttttagggattttgccgttaccctattctggaaaccacttccgtcttgatgcgcggaagccgatttcagaaatggcacaagcggaagaaaagcccacaacgactacaatgtcacaggtgacactgcattgttgtgggcacttcttttatatgcttgtgcggaacggacaagccgtctgaattgtcctttcgttttttcaccttcttattacagccggaatgccgccggatgcaggacacgtgaacgtgaatctgcacctgcgaccataccggctgtcattatgcccaatgccttcaaaccgctttgcccaccattgtatgacaggcaacggcaggcaaccccgttttccgacaaagccaccggatgaacacctgcaaccgcaagccatgcccgcatgacaaaaacggtttcaggacttcctcacggcggcaggaaagcgttgctttctccttgtccgttgcaccgccctttgaactttccgagtggcgcgttgcgccatatcttacatttttccctttttccctttttcctttccacctctccatcaagtatgcccatgttcccatgccgccattccagacggcatcagttgtcattttcgttgccggggcaaaggtaaagacgggattaggaacacaaattttttagccacaatctccacacttcactgcgctcaggtagtattctgtcgaaaaaatttgctgaacctactccctaacctttgcatggcccccgaaacgaaaacgaccgatgcacggtcggaagacgtcacaaggaaacatcggacatacggagaggcgaaaagaaaaaggactcgacccgacctccccatccgaacaagacaggtataacaacctaaaaatggaagatatgagaatgacattaaacgaaatcgggaagatattgcggaggttattgtccgcagtggcgacggcaacatcgggcatcgccctttgtgccggaggcttagccgttggcatcgcaggggaaatcctgctgggtgtggtgaacttcgtgttcggcatccttaccgccctgctttcagtagtggcagctatcggaattttcatttggttattaacactttaatttatgcagatatggcgaaaagaaacagcaagacagcggaacagcaatgtaggtattatgaggtggacaatatcttcgagtatatggtggaaacctacatcaacggcaatttttcctcattcagaagattataccacgagttgaacaaggaagcgagaaaggacttcacggattttcttttgagcgaagtagagccgacctattggcgagagattttgaaagaaaccatttaacaacacctttaagacataagattatgaggacggaaacaaggacatacgaggtttacagaatagatgaactttcggacaaggcgaaagagaacgcttacagccaatggctgacaggatatgaatatccgtggcagagcgagaacatggcaacgctaaaagcctttgaaggcatattcaacatacgcgtatatgattggaaatatgacggatgcacgtgctactaccgcttcacctcaaattatagcgaggaagaggaaggactatgtggggtacggttgctgaaattcatcgtgaacaattattggtacagccttttcaagcccaaaacttattggcacggaaaggacttcaacaaacggcgcaacagccacatatccgtaaccgatgactgtgtactgacaggctattgtgcggacatggacatactgaagcccatatacgactttctgaaatcccccgacaaacatacgaacctgcacgacctcatggatgagtgcatcggcaacttcttccgcttttgcagcaaggacgtagagtattgcaccgatgaggaagcctttgagcatgattgcgaaaccaacgaatacgaattcttatccaacggagaatttttcaactgactaaaatacatacagatatgaacggaacagaccatttcaagcggacaatacaaatgtttttggaacagcgagcagcggaggatgcactctttgccaagagttttgctaaccctgccaagaacatcaacgactgcgtgacctacattcttaattgggtgaagaaaagcggttgcaatggtttcacggacggtgaaatctacgggcaagccattcactactatgacgaaaatgagatagaggtgggtgaaccgctacaatgccaagtcgtggtaaaccataccgtagaactgacagaggaggaaaaagcggaagcacggcagcaagccatccgccaataccaagtcgaagaattgcgtaggttacagaaccgcaacaagccgacagcgaaaaaagaaacacaagtccaaccctcattatttgatttttgatatgaaaccgagaacacgcatacagaaagaggtagtccgtttgtcaagcggactgcccgaactgacagacaagcagaaagcatacgcttttgaacattgtttcaagcatcatgcctaccgcacaaaaggtggtcttatcacttgctcagaatgtggacaccgctggaaaggcggacacactcttgcggaaactatatgtggctgtagctgtccccattgcggaaagaaacttgaaattcttgacacccgaaagagagttttcaggggcagcgcatattatgaaatcattacaacccgaaaaggctatcaagtgttgcgttactttttggcaagggcaacatacaaggtgggacagcaggcagagtattccttgcaagaggtggtgcaatggtggattgctccaaacggaaagaccgaagtaatcgcccggctgagagccatgcacacgatgtattatgacctttggactgaatggagcgatatggatttgcgcagcaacaagatgctgaaagcatacaacatagacgcatacaagacttatccggcaatgcgcatcattcccgaattaaggcgcaacggcttcaagggagtattccacaaactgactccatacgaatttttcaccgccattctgactgacagcaaaatggaaacattgcttaaagcagaacagacagagatgttcagatatgccgtcgtttcaagcatcaatttgcaggactattggaactccatcaaaatctgtatccgaaacggttatcatattgcagatgcctctatgtggtgtgaccttgtaagactgctccgacatttcgggaaagacacctactgccccaaatatgtttgtccggcagacttgaaaaaggaacatgaccggcttgtcagaaaacgcgaagaacaaagagaaagggaaagagcggaacaacgcagggagcagttggtcaaggacgaaaagaactatctgaagtccaaaggcaagttcttcggacttgtgtttaccgacaaccttattcttgtaaaagtcattgaaagtgtggctgaaatgcaacttgaaggaaaactgatgcaccattgtgtgggaagctatcacaagaggacagactctcttatcctttccgcaaccattgacggcaaacgcattgaaacggtagaggtttcactgacaacattcaaggtggtacagagtagaggtgtatgcaattccaataccgaataccacgaccgcatcatcagccttgtagagagcaatgccgaacttatccgcaaacggatgagtgcttgatttatagacttcaaaatatacatgatatggaaataaagatagaaaacatactgatattatgggacgagaaagtaaccgacatctttgtcggtctgataaacaccttgtccttgagttttagcgaaacggaaatccgcaattcaatggcgaaactttcagaaaacgagaacttcggaaggctgttcgcctacggcttcggagcacatcacctttgggtagcccaaaggatgataaccgaccccgaaaaggtaatggagaaccgactactgattattgaattttaattgataaggctatgacgacgagaatgaccattaacggagtatccacctgcacggcaggcgagaagtacgagaaattccaactgaaaatcggtcgcaaagtccgcacgatgtatcaatacgactatcgggacagcgtatcgggagagttgttctcctgcgtgcgcaccacgctggacgagtgcaggcagttacgtgacgaatggattaaagcaaaggaggacaaacgatgaacgcaggatatgacacgctgatagtgacattcagcgactccgtcaaggttttggacaacatgtttgccgatgcggacgcatggggaacggacacgcttaaaggttggattgaagcctacgagagcacaaggatgacaccgataaacgactatacggcagtcatcacgagcgaatacaatatgccgtgtgtaaaggaatggctcacacgatacacacctgttgcggaaatgaaagagttttgagtgtgtggcggtggaaaccaccgcccacaccattaacaacaaccataaaaaacggtatgaaatactattttatattgacagacagcaaggacgcatggatgcagttcgtttaccttcctacgggagattatgtgtccggctatatacgtgatttgagaagcgtcggaatatccgtacacgattatgacctatggacggagaaaacacgccccattgccgagcgtaccctcgaacacgtacagaagcggatgatggcaggatgaccctatgcgggtggcgaaaattgccgcccgctacttttgacagtgagcagatagcggctcaaaagtagcaaaaagcccttctgttcccatcttccgataatggcataataaaaaatccgatgaagtaccgagtaccggacatttcatcggtttttttcatttggaaccttacggctcatacagcagcaggaactccattttccgccgccgctctatcgagcggacgacctttcctttgtatcggcagtaggcgacgtattcgcggtaaatgtccctgtccccggcttccagctttcggacaagcctgcttttcggatgtccgccatgaccgagcagccccccttgtcccacattgtagctgaggacggtcaggagcaacacatccttgccgtacctgcgaaacagcctgtaacgcaccgccaaatccttgcggagcagggcttccgcttctgcctccgtcatatcgtaggacagcttctctccaggcagtttgcggtgtccatagccgtaatacggatagtcggaacggccatgcagcccctcaaatttcttcaccagttcgacagctatgtccgccttcggatggctgttgaacacagccagcagccttaccatttcatccgcattctgtgccggcaggctgccgcaaaaggcagccgccagcagcaggagcaacgccttgcgcatcatcggctgacgttcaaggtgtccgacggaaccatactctcctccatgtccgcatccgagtcgttattgaactccagctcccactcataagcgttgccgaagttgtcctccaccgtaatggtcaggctttgcgactcgtcgcattccgaagtatagtacaggcggaacttctcgttttccagcaggtaacggtcgttgggctggaataccaggccgttgtcaagtttcagcgtgccttccccgtcatattggaaataacggatggtatagaccgccccgtcaaattctccctcacgcaccagctcgcagcgtatctccgccgtttcgcccggtgccagttccttcggcacgggcatggtttccaccgtaaacggataggcttgcgtcacgtccaggtcatcgtcacaggcagtgaagccgacggagagcagtcccatgcagaaggctgccaatgattttacgatgtttctttttgtctgaagtttatggttcaatcttttcatgttcataatcgttacatttttattcggttggatttgtctttcttttcgttttgtgcctgccgttcggcaagcgtcttttgcagatagtcgttcaggtccttgcatccgttgtagatgccggagccgtccgacacccgttcgccgtagcgtgtgcgcagggcttccagcgtccgccgcccggcagcgtcgttgtcaaggtaacaccgcatcctttcgtagccgtccagatacctgtacgccttcgccacgttggacaccgagttgaggacaaggtggtcctccccgttgccgatgcccagcacacgggcggagaggtagtccatgaaaccctcatgcacgttgcagctggccgagccgaccggcagcagggtgacatccttcggcggcacgcatcccttgaagaacgggttgcgtatctcgtagccgccccctccattaccgaatgccacggcgaaataccgcttcccgtgcgtggtataacgcatctccttgcagttcgcgatggcgacggcggacggtatgcccctttcttgcaggtagtggagcaatgcccggttctgcaagggcagcagctcgatgtcctcaaaacagggttcggcgggacgccgcacttccaggtcgcggtatggctcacgctcctgcaccggcatgtccgccacttccgccacatacctggcttgcgtgaggaagtcgctgcttcttacaaactcgcccgccaatgcgaagatgtttccgcccttgccctcgccaaaatcaaaccagaggttcttttccggatttaccttgaaggagggcgtgcgttcctcccgatacggcgacctgtaccagacggcattcgtcctgcgctgcacagggtgatgtcccagccgcgcgaggaagtcctccagcggaaaccgtttcatcttttctatgtccataggcatccgctcagttgatgacaaacttgacacctatcccgtattccgtatggcacacgcccatgcttccgccccacaggaaacgctccctgaccgaagccgtcagtgcgacaaagtccgcaaggtacagctccatgtccagcgtggcggcgcagccatagacgaaagcgtccttgtggttgagcctcgccccgtcgtacagcgtcttttcgccccagttcaccgtctcatacccggcaagggctgacgcgccagcatagaagaacagcacctttttcgcgtcagataggaagttgtaatagaaaccgccctccgccgtgaactgtgccgccgggatgcgttttgcccggtacggatggttggtctgcaggtattccacgccgtacacccacttgttgcctcccttcgcatagcttgacagcatggctcccaacacatagccgtccccttcgttcagaccggctttcacttcgatgccctgcatccccggcaggcaccgctgggcttccgcccgtcctgccagaaggacggacagaagcgctaccagaaacagcaccttcgctttcatcgcacacgcagctcgttgatggtttctgcctgtaccaggttctcattctccacgacaaacgtctggtgacgcccgccgtccttctcgttcatctccaccacgagctgcttgccgtcggggatggtgaacttcggcaggcagaacaccgtgcgttccgactgtttgccggctatacggacggcatagttgtaggcgcggagcggaaacagcacctgttcctgcatggcagtgcgcttcgccaccttcttgtccacaatcttgaacgtgatgtagtccacatcgaagggcacgttgctctggttctttatctccgtgtggaagtacagcaggtcattatggacgtagatgcctttcagcaggtactggatgccgaaacgcttgcatccgatatgcttcaccttgcgcttgttttccttgtgcagcgacttcatgatcagatgcaccagcatcgggctttcgctgcccagttccttcaggtagatttcctgcgcgttgttcggacggttcaccgtgctgccgtcgtggatgaagtccttcatttccacattgagcagcagcggttcatcggcgtatttcacgttgaaggcataaaagctgccgtcctccgtgatgacgctcatgttcgtttccgtgcggaagtttttcaccgtcgccttcacgcggatgacgttctccgcgccgtccgccttgcccgcaatcaggttgggcgaccccaggtccacgtagcgcaccgccgccggaaacaggatgtggacggtcttgtcatacgtgacttccagtccgtgcggcggtatcatgcggtcgaacatcagtttcttcgtcagtccgtggtacaggtcgccgtcctcctctgtctgcggataaacgtcctttgtcagtttcagcccgtccgtcttggcggtggcggtgctgtcgttcgtcactccctgcgcgtaggccgcacaggtgatgcccatcagcagggcaaacatcatcattactttctggatactcatttttacgttggatttagtggtgattaaaattggttcgttgattttttcttttttcgcctttatattttggggttattcattccttttcctggtacagcaataccctgtatcccgatttcaggtgcaccttgaccgtgcgcatccttttcgagatgtactgcgagatgccctgtatcgcccctcgtcccaagtccgaggcgagctgcgcccccgcatcggtggagatgttgatgctgctgcccagcgagctgcccatgttggcgccgatttccttcgccgcatccagctccatcgagccggggatgaagacacccgcctgcccgtcgctgtcatacacctccagttccaccgggatgatggtcccctcgtgttccagcaaggtgatgccgatgcccagccgttcgccctgcaagcgtgccgcgcccaccagaagcgcattccgggggataatgcgccccgacacgcgcatcggctccagcagccgcagctttacggtctgcccgtccgttatcgtctggtcgccctgcacgcaggcggcgatggtgttcttcccggtcagttccggcgtgccgacggcagtgtggaagccgtagttgcgctcgcccgcatagtccgcgatgaacgccgagtccgtcaggggctgtggcagggcggacaccaccgtccgccgcacaccgctcacgggttcagccttcatactcttttcgccggtcttggcaaatgtttccgtcccttcaggctgtacggtctgcccggcattatttcctccgctttggtactttgccgccagttcataggacttttccagcagagcgacctgttcctccatcgtggcaggctggctgtcctgacgtatcagccgggcttccagctcgtcgatgcgttcccgtagctcctctttttccgtgtcttccttcggcggctcatagaacgtgcccagcgaggtgttcagccgctggtaggcggcagcggaggagcggatgcccgcctgcctttcgtccgttgtttcctcatcggacgtttccgcccgtgtcagccgatagtcgtccgctgcggtatcgcctgcctctccgttgccgtcgttccagaatgtggacaggtcgctcaccatgccccggcgctccttctgacggtcctccagctgcaactgctcataggctttcgccttgtccccgatgattttggagtcttcgggcaggggcatgtccgtgttgaagccctgcccctgcttcgctttttccttgtcctcctgcgagggcgcgaagatgagccacatgcacccagcgaacagcaataccatcagcggatagaccagcatcttcttcctttgctgccgctgctgctcggtcagcggcttcttctctttctgttcattctttttctgttccttttccatacatttcatttttatattgttcatacgcctcttgcatacctctttgctgcggcaggtccaatttctcgatgtgccgtatctccattgtcccatgccccttgccgaagccgatgacggcagtggcggtcatgtagaggcaaaggacggcgaagacggcaaatgccgtgaggactatccccagccgtgtcttgggcggcagggcatccagccttttgcgcaaccttcctttcagtccggccatgcacttttcaatcaggattttcaccttccccatacgcctcacctttcaatcgtccggatgtccctgttctccaataccgtgaagccctcgatggtgaagccgttgggattgtcgtccgagcggcttgcattgagcaggcggcaggcggtcacgagcgtgcgctccgtcacgttgctctcgcggataatcatctggcgggcatacgtccgcgcctcgtaggggtagcggtcgaaattgcacaccacgctgtccacctgcaacacctggttgatgttccccgcgatgatgcggttgtagaagcccttttcggcgaagtcggcgtagtagttgtacgcgctcttgtccgccagcagcagggcacgtttcacgttgtgctctatcgcgcttttctccggcgagagcgtgaaaaacagttcgtggaaacggcgcacgtgttccctggcttccgccgggcggttctgcgacaggtcctgcgagagcgccagcatcaggctcttgcccccgtcgaggacgtatatcttctgccgctgcgcttcggcgaagcggaaggcgcacaccaccgagcagaccaccacgagggcacaggccgccgtatagacgatgccgaacagacgtatctgccggaagctcgtctcgatgttccttaatgatttgaattccattttcttttttcgtttttaatcggtttgcaatcataagccatcccgcatcagccgcagacctgcataccatcagttacggactcatgcaccatcagttacggactgatgcaggatgagttacggacttatctcctgaacagcttgcctgccgttcccttgacgagtttgcccgcgcgtcccgccacgtttcctgcggctgcgccagccacgcttccgcccagggcaccggcggtgttgatgttcttgttgtaattccctatgccgcctccggcctggatgatccatccggctaccgtcgggatggtgaagtagcccacgatgccgatgatgaggaacacgatgtacaccccgttgctcgcctccaccgaaaaattcgggtcggcctgcatcgcctcgatgtcgttctgcagcatcagtatctggattttcgccagtatggtgctgaacaggtcagaaacgggcagccacaggtaaatctgtatgtagcggctgaaccacgccgaaagcgtcgagtggaagccgtcccataccgagaaggcgaaggcgaccggtcccaggatggacagcaccacgaggaagaacgtgcggagcgtgtcgatgatgagggcggcagcggcgaacatcagttccagcagctcgcggaaccagtcgcgcaccgtcttcttgatgttgtaggccgcccggtccatgtacatccccgtcatcgtcaccaggtccgaaggcgaccagcccagctcgtctatctggcggtcgaactcctcatcgctggcgagataggcggtttccggattgcgcatcatcgcctcgtattccagcttgtccttctgttcccggtactcgttcatgtcgaaggtctgttcttcgaggatgccgtgcacgccctgcacgatggggctgagcacgctgttcatcgtgcctaagacaatggtcgggaagaacaggatgcacaggccgagcgcaaacgggcggagcagcgggtacacgtctatcgcctcggcgcgggcaagcgactgccacacgcgcaccgccacgtagaacagagcgcccagtccggccagtcctttcgccacgcctgtcatgtccgcgcacagcggcatcatctcgtcgtagagcgaaagcagtatctggtgcaggttatcgaactctcccataggctaccagtatttttcgttggggttgccgtagagggacatgacccggtccatgtcattcttcttccttgcccgaaggtagctgaccgatatggtcttgttcgtgtagtagcgcacgaggttgcggtagttcatcaggctgcggtaggcattgtcgatgatggcgagccgttccgcgtccgagagcgacatccccgtcacgttcaccacgttcttcaggtcctgcagcacgtccgagctttcgtctatcagcatggcatagcccgacgagatggcggcaagctcctccggcgtgtagttctcgtccgagagcatcttctggtaattgtccacgtagatttccgatatttccatcaccagcccgatgctcttcgacaccttcacgccgcccttcaccacgtcatgcacggatttcaaggcgtcgtaatacttctttccctgctggaaaatcttttgggtttccaggaagccgttgagggtgttcgccttcgtgcccgccgtttccaccatctccttggcggagttgatgatgctctgcgccaggttgccggggtcggacaccacccattgggcgtttgccctgcctgcacccagcaggcacaggcagaccgccataagcggcattttcagtttctgtctcattgtcattcacgttggatttagtggtatgttgattttactgtccttcgtccttttcaccttccgcacccgtgttcacccggatgtagtcgccgttcggcgagaaggtcagcacgtccgtctcctcgttgtaggccacgtcgatgcggaagccggtgttcatgtagaggtgcccgttatcctccctttgcagcaggtaggtctccggcttcagcttccggcgcacgcccgtccttcggaacagcgtcaccttgtagagttccccttccttgtacaccagcacatcgggttttccttccgcgctctcccagttgccgcaaatcttctcgcgcacatcttcgctttctttcattgccgtctcgcaggcttgcagcatcagcgatgccagccctatcaggccgccgcacagcagcagccgttgtgattttgtcaattcaatgttcatttcctgtttcaatttttaatgatgaataatcgctttacagtttttcttcttttcgcctttccgctatctgccggatggcggcttccatgtcgccgcccagtttctccgccagttcgcgcacttccatcttctccgtttcctccgtcgtataggcgaggtattcgggcatggacacctccgtggcgtacaccgccgactgcgtgccgcccagtcctatccacacttccttgtaccgtctggacgggtcgttcgcctggttgatggagagtatctgccctttctccttttccgtcagccccaagagggactgtatctggtcaaagcggttcatgaacttgcgctggtcgagcagtatcttgcagtccgagttgttgatgatgctctccttcacgatgggcgagctgataatgtcgtccacctcctgcgtcaccacgatggcctccccgaaatactttctcaccgtcttgtacatatacttcaggtagtccgccatgttcgccgaggaaagggctttccaggcttcttccacgataaggagcttgcgcactcctttcagccggcgcatcttgcccaagaacgcctccatgatgatgatggtcaccaccggaaacagctcggcgttatcctttatggaatcaatttcgaagaccacgaaccgcttgtgcaacaggtcgatgttctccgtcgagttgagcaggaagtcatagcgtccgcccttgtaatactgccggagcgtggtcaggaagttgtcgatgttgaagtccgtcttcgtcaccttgatgtagcgttcctccatctccttgcggtacacgtcacgcatgtattcgtagaacgagtcgaacgacggcacgatgctcttgtcctgccggattttcaggatgtaggcgttcaccgcgctgcccagctccgccgattcggtcttggtggcgggctcgttcgcgctcttccacagggtgagcagcagcgtcttgatgctgtccttcttctccacgtcgaacaccccgtcatccgtgtagaacggattgaacgagatgggcttgtcctccgtgtaggtgaagtagatgccgtccctgcctttcgtcttgcggtgtatcatctcgcacagtccctggtaggagttgcccgtatcgaccagcaccacatgggagccttgttcgtaatactggcggacgaggtggttcatgaagaacgacttgccgcttccgctcggtcccagcacgaacttgttgcggttggtggtcactccgcgcttcatcggcaggtcggaaatgtcgatgtgcaggggtttgccgctgatgcggtccgccatgcggatgccgaaagccgagggcgagtccttgtagttggtctcgccggcgaagaggcataccgcctgcccgatgaacgtgtggaatgactcctccgaagggaagtccgccgcgttgcccggtatgcccgcccagaacagcgtcgggcagtccgtcgtgttgtggcggggcacgcatcccatcgaggccagctggctgcccacgtcgttcttgatgcgtttcagttcctccgcgtcgtcgctccatgccatcacgttgaagtgggcgcggacggatttcagcccctgcgagtgggcctcgttcaggtattcctcgatccactcgcggttgatggcgttctggcggctgtaccgcgagagcgactgcatgttgcgggcggtcttctcgaagcggcgcagctcctcgtcgctgttgccgatgaacacgtactggttgtagatgtggttgcagggcagcagcaggcccagcggcgcggcgaaggacaggcggcagtccgagcggtcggtggacagacgctcgtagcggctgtccgtggccaccgcggcgggcaggtcctccgtgtccgacagggtgtgcaggcacaggcggttgtcgccgatacgcatctctccggcggccatctcgatgtcctccagacagtccacgtcgttcagcgagagggcgaagtacctgccgatgatgcccgtttccttctccgtgccagtgagttcttcatcggagaggcggcgcagcctgacctgtcccgaatcgttcatgatgcgggcgaactgctccaccgcctcgatgaacttcaccgccgtttccttgtcctgtatctccttcggcacgatatgcccccggcacagcgtgttccagttgctctgctgcctcatgcgctctttcgtcgtcttcgtcaggaacaggtagcacttgtggtgcaggaacgggcgctcgttgaagtgcatctcgtagctccgggcgaggaagcccatgccctcccggctgaggtcggggcggtattcctccttcacgtaccagtcctgcttgtggaccaccgagtagtcgggcagcacctttatcgccttgcaccacgtggcgtggatgccctcgtattcctccgccgtgacggtatagacctccggcagctccacctcgaaggcggcggtgaggtccgcgtccttcgacacgatgcagccgtgctccaccgccagcagggggaagcggctttccagcgtggtggctttcatgatgtttctcatatgtttcttcctttcttcttttttcgctttaacattttggacacccgtctgcggtggagcacatggcaggggcgcatccgtgccgcgcccagcttcatcagcccgtgttcgccgtaccgcgcgttcaggcggaacgtgagccacacgagcgaggaagcggagacggcgccgaagccgatgcagagccattgccccgcgcctgccatgtacaggatgatgaagaggacgaaggcggcgagcagcccgcctgcgaacaggaagaggtattgcgccttcagccccttgaactccaccggacggccgatgcccttgtttatggggtattcagccattgtccttatacctttttattataggaagaatgagcgtaggatggtcgcactcacaatcaggaagatgcacgcgccgaaccagcttgcggcggtcttcgaggtgtcggggtcgccggcactgaacttgccatagaccttgatgccgccgataagcccgacgaccgcgccgatggcgtagatgagtttcgtggcggggtcgaaataggaagtgaccatgctggtggcctcggtgatgcccgccatgccgtttccttgtgcgaacgctgagatattggcagccagcagaagggctgcgaggataatctggttctttttcaatgtctttgtcataatcgtttcttgtttttgtgcctccgggtcggatattcccttcggcggttgatacttgtttttaatttgagggcgtttccgcccgttgctggatttagtggtctcggtggcaagtcggtcgtttagccgtagtcgattttcttttttcgcattttgttacgttttactggttatacatagtcgcggatgttgaaatcctcaaatttgtccggtacagtcgctacttttgagggccgggctgccggagccggtcctgcatgtgctcccgacacggaatccagatagaagtccatcagtttgtccagcttcctgcgggttgcctccgaacttttttctatcatcgcgaacagctcgttgcccttcatgtcgcagaacaccatcccggcgtggcggcgttcctcccttgtcgctttcgggttcttcaccgtccgcatggcaaggtcgatgtcctcgaaggtgaagccttccgcctcatggggttcgccgtccggttccgcatcttcatcgtattctgcaccgatgtccgaaacacgtttgtcggcaaacaccttgtccagttcctcatcgggcacttgaagcggatggcgttcctgtgtttcatcggcaaaggtaacgtccttctcgtccacggcctcgactttcaaggaagtggcagtttctggcacagcagtgtccttttctgtccttgtccgctcaggcatcctgaacttgctcttgcccataaggtcgggcagcggctcctgccggttcgccgtatcgtccttgttgtcacccgtccgcatttccttatgctcacatgtcaggtagaacagcatccacaggttgcaggccatcatcagaataatcaggaacgtcaccatcggtttatcgtgttacgtcctaccacctccttgtatttcctctcccgcgccttttccagttcgttcctgtgccgttcaaggtgttcggcaagtatgcggtcaatgtatcctgagatagtcgccttgtggtttccaagcataccgactatgcgtttgaccgcatcatggttttcacggctgatatacactgccttttgtgcacatccttccggcttgtgagggcacaggtacttctctacatagcctttcggctttcttcgtctgataaaaatgttgatgttcagtctcatgtctgtcttttttgttatacaatggttgatttcaaatcaggtcctccttcttacggcggtaaaggctgttgatttcctccctgttctctttgaagtggagcatcagcactgtgtcaatgtaaccgccgatggtaatttctttgtcagcgatggcgttcactatcttggacacaatgccgtgcgccttcttgcttatatacacgcactgacggtttttcagctcgccgcgactgaaaaaagtcgccacgtaatccgttttcatgccagtattcttcttcttaggctgtttcttttccataatgtacttgttcaataaatgtcttcgtaattcttcttgtaaagcctgcgtatcacgtcctcgttttcacggaaatgttgttcaagcacgtggtccacatagaccgataacgaaaggctgttttttccgatgaccctgacaatgcgctggatgcgttcatggaactccggacgtatataggcggacttcgcagatctgaccggtcctttcactgcctggaggtatttttccatatattctgcctcttgcatttcacggtcgtccgttttctttggccgcacgtcctgtgcctttgacgggacagggtgttccttgctggttcctttttcatccgcgcagtcttgggcggcggacgcgggcatttccggacggaacgagtccagaaacttgccggggtcaatatcgacatcgagttttttcgccatgtgttcaacgctttacgataccgagtatttcttcagcaagggcgtcgatgccgctacctttcgccaatgccttatccgggggcagcagcgtggaacggaaaaacgggcggtcgccttcctccgaactctccttgcggaaacgcttgctgtccggcaggcatgttttcaacgtttcaagccccatcccggcaatcaccttgtcgtagatctcgtacaggtcggtcttctcgcgtttgtccaccatgttccacagcaggcggatgcctttgatgttcgatttgccggtggtgatcagcgtgtcgttgatgatgcttgcatacttcagcgaactttccatgatgaaacggtcggcggctatcgggcagaagatatagtccattgtggccaccgtcttgatcaggtcaaggttgttcaccgtacctgtcaggtcgaaaaagatgaaatcgggcggtgtcgccgattcgatgaagggcttggccgtttctatcgcattgtccggtcggctgcccacaatcgggtaggcacgtttgtcgatgcgcttgaactgttcgtatgccaacttgcgcaggtacggattgcgctcgatgttcttcaggtcacgctcgcgcatgtctttgatgctgaactgggggtagtcgcaatccacgaccgccacgtcgtaccctttcacataatacaggtaactcgccatcagcacggtgagtgttgtcttgccggctccccctttttgggtggagaaggcgatgaacagaggttcttttttcattctttcttctttttaatgttagtaatttgttgtcaggtcggctttccttcctgtttgttgtcctgtacgccggtcaaccgtccgtcacgcctgccttccggtctgcctgctctccggctgttcggcagactggacatccggcaatccggcaggtcggacggttggcaggttggccaacctttctgcctgcaaagtaaaggtcattttcccaacaccgtaccgtttccgcctttggtggcagcttgtggcagcaagtggtagggagtggcttcgttccccgcgggtttccaagatgttctccgccttcccgccagcctgtttgtcggccggtttgttctccggctgtccggcaagccggccatccggcagactgacaggttggccggtcagaaggttttcccgtcggacaacaggtcggtcagccggtccttctgcctgcaaagtaaaggtcattttcccaacgctgtaccgtttccgccttcggtggcagcttgtggcagcaagtggcagggagtggcttcgttccccgcacgttctcaatggcttaacccctttacctttgcacccaagcggcagggcaaggctccgggcgcgtaccgcagtccccggctccgtccttcttttgggcagccaaagggtatcgggcgaccgataccttgccgggtggttacaggcaggtttatccccaatccgtcgggtacggatttttgtgtcctctaagacacagcaaggtatgtttcgagtaactcgaaaccttgcgggttactcccgcaagccttgcccctgaaaggggaaggggcttcctctccgaagtcgggaagcctgtctccacctgcggtgcgtatgccgaagctgcgcttgtgccgtaacaccactaaatccatagtaacaatgaacagagaacgtaagaaagggggcagacaccccaagttggaaaagaggacgcaccatgtgatgctgcgtttcagcgacgaggaatggctcaggttcctcgccatgtacgaacagacggaggtcagggcaaaggctgttttcgccaaagcccgcatcttcggagaggaattccacgtgttccgggaggacaggacgctggtcgaatactacgccaggctgtcctccttccatgcgcaataccgcatgataggcaacaattataaccaggcagtcaaggagctgcgctgccatttctcggagaagaaggcgatggcgttgctctacaagctggaacgatgtacgaaggaactggcggctttgacgcgccggattgtggaactgacaaaagaattcgaggaacgatggtcgcaaaaatcagtttagggaaatcgctgttcggggcgttggcgtacaacggggagaaaatcaacaaggagcagggcaagctgctcggcacgaacaaaatcttcgacggctgttccggcaggatggacatccgccgtgccatgcaggacttctcccgttacctttccccgcacacgaggacggagaagcccgtcatgcacgtgtcgctcaacccgcatcccgacgaccgcctgacggacatggagctggagggcatcgcgcgtgagtatatggaacggatgggtttcggcgaacagccttacatcatctacaaacacgaggacatcgaccgccaccacctgcatatcgtaaccatccgcgtggatgccaatggcaggtgcatcagcgaccgcaacaacttccgccgcagcaaggagattacccgtgacttggaacgcaagtacggcctgcaccctgccgaccgcaggcagcagcgtcacgacaatccgctccgcaaggtggacgtttcgcagggcgacgtgaaacgccaggtggcgaataccgtcaaggcggtcatggcggcctacaagttccgcacgatgggtgaataccgcgccctgctctccctctacaacgtcacggtggaggaagcgcatggccgggtgaacgggcgcgagtaccacgggctggtctattccgccaccgacgacaccgggaacaaggcgggcaacccgttcaaggcgtcccgtattgggaaatccgtcggcttcgaggcggtgcagcgcaaatttgcccattccgccgtccaattccgtgacaggcggctggcggataagacgcgcaagaccgtcgccgccgcgctcgcccggacgtaccgtaaggaggagttcatcgccctgctcaaagggaaaggcgtggatgtggtgttccgtcacacggacgaggggcgcatctacggggccaccttcattgaccaccgcacggggtgcgtgctgaacggctcacgcttgggcagggaattttctgccaacgccttgcaggagcacttcaccctgccgtatgccgacatgccaccgatgccgttcaccatcacaagggacgagccgcaggcggaagtccatgcctatacggggcacgacgaggtacacaccaccggtttgggcctgctctccggcgacgtatcgggcgcacaggcggaggaagccgccttcgagcgtgacctcaaacgcaggcggaagaaacgccgcaaaggtttggggctataatcctattttatcaactaaaaaacagaaacagatttatgtcacaacagactgatgatttgagggcactggcgaagattatggactttctccgtgccgtgagtatcctgctggtggtcattcacctctattggtatggttacgaagccgtgcggctgtggggcatcgacatcggcgtggtggacagggtgctggtgaatttcaaccgcaccgcagggctgttccgccacatcctttacacgaagctctttgccctgctgcttctggggctttcctgcctcggcacgaagggcgtcaaggaggaaaaaatcacgtggggaaggatttggacggtgcttgccgcagggctggtgttgttcttcggcaactggtggatgctgtccctgccgctgcccgtggaagcgaatacggccctctatgccgccaccatcgccgcaggatacatctgcctgctggtggcgggcacatggatgagccgcctcttgcgcaccaacctcatggaggacgtgttcaacgtggagaacgagagcttcatgcaggagacgcggcttatcgagaacgagtattcggtgaacctgcccacacgtttctattataggaagaagtggaacgacgggtatatcaacgtggtcaatcccttccgcgccaccatcgtgctgggcacgcccggttcgggcaagtcgtatgccgtggtgaacagctttatcaagcaacagattgaaaagggctttagtctttattgttacgatttcaaatatcctgacttatcgaccattgcctacaatcacctgatgaaccacccggagggatataaggtcaagccgaagttctacgtgatcaacttcgacgacccgcgccgcagccaccgctgcaatcccatacacccggacttcatggaggacatcaccgacgcttacgagagtgcctacaccattatgctcaatttgaacaaaacttgggtgtgacctgaaaagtcacgtaattgattgttaaacagcaatgtatattgcaagatttaacccgctgttccgtcagcggtagcctactataaggtgcatctccagtgatgggttgtgctaagcttataggacaaagtacactttccgaaaggacaagactgaaccgtgagggaacgtcaagggcggttagtatcataccgtcgagtggcgaggctggatagcatggttaacgtaatgtgaactgactttagccgtcgtaaggtttgaaggagcgcaagatactttagctctcaccaaaaggtaagcagtcggataaccctcgcccatgttggggttacacggacatagcactgccggcggacttggcagaacctaaactatccgtttgtcaattgcgtggaacagggcaagcctgtatctctctcgtaataatgcgagtaagcgaaccgcaaggcaagccgaatggggtgcaggtatgagataacggagaaagcgaatgccgccctgtaatggggaggatacggattgaaccaacatcacgagttaatgagggtaacatcatccgacacgaaagtgggcagacttccgtatatggtaactctttacaagataacttttagaactttcaaaaggaggaaagcaaatgaacgagattaaaacatcgtgtgcgcctgctgacagcaggaatctgacttgggacggtatgaactggtctaagtgtgaaacctatgtccgaaagctacaagcgcgtattgtaaaggctcagaaagaaggcagacataacaaggtgaaaaccttgcagtggatgcttacccactctttttacgccaaggcattggcagtaaagagggttacttccaacaaagggaagaatacgtctggagtagataaacagctttgggactctcccaagcgcaagtacaaagcaatcggtgaacttagacgtcgtggctaccatccacagccgctccgtagggttcacatcaagaaaaagaacggtaaactccgaccgttgggaataccgaccatgaaagacagggcgatgcaagcattatatctcatggcattggaaccgatagccgaaacgacaggcgaccgtttttcttacggcttccgaaagaagcgcaggacaatggacgcaattcgtcagattgatacggttctaaatcgccagcattcccccgaatggattttggagggagatattaagggttgcttcgaccacatcagtcacggctggcttattgaaaatatccctatggataaaacaatactcagaaaatggctgaaatgtggagctgtattcaatggtaaactgttcccgacagaagagggtacaccacaaggaggtatcatatcaccgacacttgcaaatatggcacttgacggacttcaaccactcttggctgaaagattcaaaagacgtttcatcaactataagacattccactacaaagtgaatcttatcaggtatgcggacgactttataatcacaggtcgagataaggaattattggaaaacgaggtcaaaccaatggtgatagaatttctcaaagaaaggggtcttaccttatccgaagagaaaactaccattacgaacatatacgatggatttgatttcttaggtttcaatgtaaggaagttcggcaaaaggctgtacacatctccgtccaaagatgcacagaaacgctttagggcaaaaatcagtgacatcgttaaaggacataaaatgtgtaagcaggaatcgctgatacgaatgctcaatcctgtgataacaggttggggaaactattaccgatatggtgcatcaaccaatgcttttcacggttgcgacaatcacatttacaacctcacaaagaaatgggctttacgtcgccacccaaagaaacgcaagtcttgggttgcagataagtattggcatgaaattcgggggcgtaaatggacgtttgcatggaaatatgaaacaaaaagcaagaaagtgaactacctgacccttaaaaggttgtcggatatacattatactccgtacaagcaagtcaagggggaggcaaaccctttcgacccggaatatgatgattatttctttcagcgaaaggagcaacaaatgctggaatctctcaaaggacgtaagtcactcttatatttatggaacaagcagaagcggacttgtccgttatgcggcaaggagatagattgtacaaaagcatggaacgtcaatgaaatatctgttggtggttcaattgtacggcaacttgtccataacaactgctacaagcgaaataaacgaaactgttgaaagtatgagccgatttctaacaacaaatagaaatattgagttgcttgagccgtatgaggggaaactctcacgtacggttcttaggggagaagggggcagtaatgcccttgacttacccgatgtgcaaaaacagggcgacttctttgtggagtcaccgattatcctgttcgctgctgtgatatggttcctccgcatctacaaggacggcaagtactgcaccttcccccacgccatcgaattgttgaaccgccgttacgaggatgtgtttcccattctcaccagctatcccgaactggagaattacctttccccgtttatggacgcctggcagggtggcgcaatggaacagctggccgggcagatagcatcggcgaagataccgctctcacgcatgatttctccccagctctattgggtcatgtccgacagcgagttcaccctcgacatcaacaaccccgatgagccgaaaatactctgtgtcggcaacaaccccgaccgccagaacatctacggtgcggcgttgggactgtacaactcgcgcatcgtcaagctcatcaacaagaagggcaggctgaagtcggcggtgattattgacgagctgcccaccatttacttcaaggggctggacaacctcatcgccaccgcccgaagcaacaaggtggcggtctgccttggctttcaggacttctcccagctcaagcgcgactatggcgataaggaggccgccgtggtgatgaacacggtgggcaacgtcttctccggtcaggtggtgggcgagacggcaaagacgctctcggagcgtttcggcaaaatcttgcagaagcggcagagcatcaccatcaaccgcgaggacaagtccacctccatcaacacgcagatggagagcctgatacccgcgagcaagatttccacgctcacgcagggcatgttcgtgggtgcggtggcggataacttcaatgagcgcatcgagcagaagatttttcattgcgagatagtggtggatgccgagaaggtgaagcgcgaggaacaggcttacaggcctatccccgtcatcacggacttcaccgatgccgacggcaacgaccgcataaaggagacgattcaggagaactacaaccgcatccgtgccgaggtgcggcagattgtcgccgacgagttgcagcgcatacagaacgacccggaactgcaatatctcttgcagaacaagtaggacgacaggcgaaaaaagaaaatccgtaactcggctatctcagaccgggttacggatttcctttttcctataaaatgaagaacgccccacgtatgctgccttacggctcgcctaggaagtctcattgtctttttattagagaaccttattcttcatttgacccatcgaccaaagaaatcaagtcaaaatacatcagtcttgttttcagctttatatccttgtcgaatccggtattctctgcttcttggctctcggtagaaaacagaaaggtaaagccattcttctggtaatatcccaaaggaatttcctcgttataagcatccacaatgagaaaacggcacccggtcttgttgccggcatcaatgaaccaggatttgatgaattccatcagttcactgccaataccccggtgggcaaagtccacgttgatgccgagccgtccaatcaatacgccgggataacgccgcatctgcttggaatgaggaatgtgtttctgcacttttttctcccggctgttgggcaacatatccacacggatgctgtcgttggaaagcgtaaaggcacagacaatgacagacaagtcctcgtccagtctgaaacaataactttttcccagcatttgcctgctgtaaagcggggcatcatgctggaagaactcgtccaagtcggcgttcccgcaggaaaaagggcggcaacatgcaataacttcctcgtccaataacgagaaactgcatttatctaacaggaaccccattacagcatattggcttttttcaatatggcgcgggctatctttacctgcttgctgaaatcagtttttcccctgttctggtaagccttgtccgcctctttcacgaaacgttcggcatccttccctctcagcgtggggattgctttaatttccaatgccataatatattgttttataattacttctgcaaaggtaggcattttccggcaattttccataactctgctttcttttctgccattcttgtctgattgtcaaagaggtaattaccgttttctcatccgctcccgttcctcgtccagcaacatccttttgttcactttctccgccgcccggtcaaggaagtaggtgcggctttcgttcttgcgcatcttgatgtcgttgtagatattataacagccttttgcctgtaccccgaacaccttgtacaggtaagaggctatctctttcagtgaggcttcgccgtcgttgatgcagcccatctcgtcaatgccataaatcagttccacgaggtcggatgccttgcccgtccacttcatcggcggggcatcggcggcatgtccgtctttcttttcgtcttgtatatggatggaggatagtggcggcacccggttgtatggcgaggcaaggtgtttcagcatcttgcgcacgaaggacagggctttgcggacatagatgccgtggccgatggcggggtcattcagtgccccgtggtattgcagttccgtttccgcatagctcagtgcgggcagcgggtggcaggatgccgtcgctcccgtgcagagcgagatgacctgcgcgatgaagtcgttgtatgccgcgcacagtccggtacggctgtccgggttgtctatcaggcggaagaactccgtttccgtcaatatgagatgttccatttgctttcagttttatgttgttacacttgggttgaagtgtgcgcacataaaaacaatggacaaacggcagtccaacggaagcggtttcctataacctgatttataactgtttgatactaagtgaaataattgctgaaaataattttattctccccaggcagggcgtttcggagtgttcagattctgaacagttgttcattttctgaacagtcttttgagcggggatgtgttcattttctgaacacttgccccgtctttccgctgatagacggctttcagcgccccgtccttgtatgcctttaccgcgcggcatgtccatctgttggcggggaggtcggactggaacaggcggcagccgttcccggcaatgatgggtatcgtgcagaggatgatttcatccacctggcggaaccgcagcataccgttgatgatgcctgctgtcaccttggtagcttctatgagataaacggaatgggctgggctgtccttcacccagccggatagcagggtcagcggggcgttctcgtccagcggacgggcggtttccttcatgtccgctaccccgaacctctccgccgtatcggtaccggcaagccattcaccggcttccggcgagctgtcggcaaggcatccgtccagcgtgaggacggcaaacaatactacttttcccattcggccgttctgttgtgaccgtaagccgacaaaaaatagcgtgcaattcacactactttctgatgacggctctggactgcctctacggaatgtacgtgactgcacgctatgccaaggcatagcataagcatcacgcaatcgtctccgtagttccaatttaccagattttcgcttgaaacgccttgcggtcttatcctatatgttggcggcgaaaagctcctgccaatcgccgtttttctcaaatgttatgcaaagatagccaaattcagtgaattacgggctatgattgcttgaatttatatttaagtccatactcttcaagtttgctgtatagtgttgtcctgcctatgccgagcagttctgcggcgacactccggttgccgtttgcctgtttcaacgcacgcaatatccgctccttatcctccgcgtcattgcgcaaggcgaagctgacagtagaggtcggtttcgtcacggcaagttccagatgctctttcatgacaacaccttcctgcgcctgcaatacagcacccataactttctgccgaagttcccgcacgttgcccggccatgcgtgtgtcagcaacgctttacgtgcttcggaactgaacccgctcacgctacactccagctctctgtttgccatatcacggaagaactctgccagcggcataatgtcttcttgacagtcacgcaacggaggaacggttatcccgaagtcgtgcaggcggtacagaagatcctgccgaaaacgcttttcattcaccgatacctccaaatcttcattggtagcagcgatgatgcggacattgaaattccggtctgccttgtctccgaccgggcgataccgcctctcctgtatggcacggagcaacatctgttgggtttccaacgcgaggtttcctacctcgtccagaaacaacgtgccgccttccgcctcatgggaatatcctttcttggcattgtccgcacctgtaaatgcacctttgacgtgtccgaagaaagccgacggtgcaagctctttggagagtgaaccgcagtccaccgccacaaatggcttgcctgcacgtttgctcttgtcatgcaacaggtgggcaatatgctccttgcccgtgccgttctcaccaaatatcatcacgctcatatcggtggcggctaccagccttatgcggtgcatgattttctgaaaggcggaaccttcacgggcgaatataggcatacggcgttgtcctgcctgacgttctttcagtatggaacggatcagggggacaagtttatcctccacaagctgtttgggaatatagtctatcgagccgagtttcatgctttccacggcggtattaacttcggcgtagtcggtcataatgatgaagggctgcatctttccctcctttcgcatccagcacaaaaggtctatgccactgccgtcaggcagacgcaggtcggcaaccacgatatcattatctgttgcctgttgcagatgtttcttcgcggttgagaggtggtaagccttcatattgcggtagccctcccgtgacagcatattgcagacatattcgcaatacacgatgttgtcttccaccacaattatttttgtcttattcatcttcgtattttctcctttcctcttctgccaaccgtattatttccactcccttatccagcacggcagtcacggcatggcttaacgcttcaccatccgggagagcatcgccacgaagcaatccgtaaagtacattcagcggttggtcggcacggagcacctcccacgaactgcgcaggtggtggatcagggaatccagcttttgcaggtctttttcttttgctgcatcccgtaccgcctgcatttccttttctgtttcagttatcaacttttccagcatgacggcttcattgccataggacaataaggcggaaaagtccggtttcccgtccggtgtcgcttttatggcacacctgtcggaaacctccatcagttccgatatggagaacggtttgaacaggcatccggcaaagccttttgccaatagttcccctttgttacaactgcccgaagcggttgccacaaccaccgggattgttggtgaattgcccacgttggacgaacgcaacagttccagcaattcgaaaccgtttatatcgggcatattcaagtctgtcagcaacaggctgtattctttctggcgtatcatttccatcagtgccgcagcatcggtgcaagtgtcgcagtgtattccttcttgggaatacatctctttcagcatcagaagtaatacctcatcattgtcaatggcgacaacatcatggaatttattgttatgataaacaggtgtattgcttgtatatccaagctgttcttcagcttcctgcatagaaatttcaactgtgaaacgactgcctttccctttcttgctgtctaaacggattgttccgccaagcatcgacacaatattacgcattatggcaagcccaagcccgaaaccctcctttgcggcggcatttgatagacgttcaaacgcaccgaacgcttgtttctgttcctcttctgtcatgcctgtacctgtatcttcaacgaccagtgtcagaactccattatcatattcagtaatcaaagaaacaccgccttcttctgtgaacttgacagcgtttgacagcaggttattcccgatttgtattattcgctctttgtcggtcaatacaatggcatcgtgtccagtcttcacggacaaggacagccctttgttcacggcaacaggcatgaactccgtttcaagtgtgtgcgtgattgctgaaatccggcagggtgacagacggggctgttccttgccgttgtccaggcggaagaagtcaagcaaagtgttaagcatatcccgcatacggtcggaggattgcagtatgttttggatatactgcccggacttatcctcacactgttctttccgtatcagtccggcatagcctgttattgctgtcagcggtgtgcgcagttcatgggtgatagtatgtaccgccttcttccttgacgttatcagtgcctcgttccgttgtacggattgttccagttgccttatcaaatcagttgtcttgtgcttgtattgtttaatgctttttgcatcacgatgtatgatgatgtaggaaattaacaacaatagaagaacgaatcccattaaaccgcctacttgcataaatgacttttcacgcatggcaactatttcgttttcccggctttgcagttcggtttgtaccttttcttctatttggcaaatcaattcttgcagttgtctgttaagttctgcattacgagctgcaaggctgtcggcttgttccgacaattggcgatcctgcactttctgttcgctgattacgtttctattgaccgaatgaaggatagtggttgatactgctggagttacttccttttttttgccgaatatgcctaagaaaccttttcgttttggctttttggactgttcctgcacacttttctgtacaataaccggaatttgattggctatcttcttgttaatagattgttgttcatccattaaccggactatctggaacatctgtcgttccttatcctctaaaagactgcgcacactatcgatgcgctctgctggataggtggccttgaaacggcagagcatactgtccattgccatacgccgtgcatggtaatgctcgatatctttatcgttccattccagtattgtttcacccaatagagaaaattttatcatttgaatattgatattgtttatttcttttcggagctcgtctatttttttattgccaagttctaatgcttctatctcctgccattcatagaggctattatatgccatacatccgataagaatggagataagtatatatcccaaccgtattgccttatagaaatttcctgaccgctccattattttaatgacattgatttttggaacatgaataaaagtttatctttttcgttcatgcggatattatcagaataaccgtcttttgttatttgatacccacatggcttaaccataaaaatgcctaagcccttagtgtacgaacttacttctgaggcatagtctttacttgtatttaatggaactttccctttaatatgacaccactcattattacaactgatgtcttcaatctcagacatcagtttttgcaaatctgtaatagctttggaactcgctacttggggtatctgcaactcaaaacagagcatcggttcgagaatgtccacacctgactgttgcaaagccagcctgaagacataaggggtcagctgtctgaaatcagcaggtgtacttaccgggctataatactcggcttgagtaaaagttactttcagatctgtcacttcccatccatgtaaaccagattggcaagacatacgaatcccttcaaaaacggcattttgaaaagaatggttcagataaccataggagatgtcactttcgatttgcaaccctgcccctaacggtaagggttcaagagtcagccctattgtggcccagtaagggttgggtggtacttcgatctgaataatcttattgaccttttttataggtcgttctttgtagatagtcttgatctcatcaaaatggacctttacggaaaatcgttcttccagcaatgtctgtatgatttccttttgggtcaaaccatataacgagatttccaattcatcactatatgagtttatggaaaaggacaaagacgggtcttcaatccacaatgtattcagagcggatatcaccttgcttctctcttcgggcttatttggccggacggaggatttgagagcgggatgctgatgagataatccttgaatcaaacaaggtttagcacctaaataatctccgattcgaaaatcttctatatcttctacaatcgcgatatcattggcacccacttcatcaacatttatctctctgccctgataaatagtctttagatttttaatcttgatgaatttttccgaatcgttgattcttacaacgtctcgaagtctcagacttccgtcaattattttaagaaaacttcttttatgccctttggggtcatgctctatcttatagagataagctgaaagtctgtttgagactgatgccggaggaagtataaaagaagaaatggcgtccaacaactcattgataccgatattgaacattgctgatccatgtagcaccggatagactttggcttttgccacaagagcgattatcgtattccaataatcagccggtgaaatttcgctatccgccaaatatcgttctaatatatcgtcgtcatggttgcatacaaattctttgtattcttcctttatatatgtttgggagcaaaccggataaaccgatccatcgacaacagtttgcataaacaggacatcttgcgacagatttgtttttatatccatatacaaacgctccaaattcacaccggcacggtcaatcttattgataaatataattgtcgggatttgcagcttttgtaaagtactgaacagcaactttgtctgcgcttgtatgccttcctttgcggataagatgaggactgctccatcaagcattttgaatgtccgctccacttccgcaataaaatccatgtgtcccggagtgtcaatgatattgcatttcactccattccagataatagatgtcgtagaagcccggacagtaattcctctacgtttctctatatccatagagtccgttatggtgtcaccattatccacacggccgcacttttccgttgctccactggcaaacagcagattctcggttacggaagtttttcctgcatcaatgtgagcaagaattcctaaatttataatattcatttggattaagcaataatatactacagtagatgcattgtcgaaacgcaccttttaatacctcctcgtagcatatgagaactacaggattactaactcgtattaatatgtatattattactgccgcataacgattacaaaattacacaaaaaaatatatctaacaaaagtgggaggattttttaactttttaccatagacattttattagggaagcgtaggttcaactggcaagtacaaataagtagaaatgtttgaacaacaccgttttaggaagttgaaaaatcaagtttctctctcggtatagcgtttattttggccaatatcttctttagtttagcatttgtgtatttcccattcgtgttctatttagctccttattatgagtatgtagcaagttacttatcaaattcagcctctttgagggtcaaatatggttttgcaaatggtgactgacaagacataaacaaggtcagcaggaattttttacataaatggacatgaatgtatataacctaaaataagaataaattttaataagggctgcccaaaaagaaaaaaatgcagttgccatcctatagatacttgcagaaaggataaaatttacttttagaccttttgggatagcccttattaatacttcagataaaattccttaggttatattttcaatcctttggaccgggtttcctccttggcatacagtcccggacgcccgattatgacatggttggcaacgatactatccgccggactgcgtatctgcggcggtgcattttcgggatattgcgcctgcctgttcctcacatcttccgcttccggcttgagctgttgcccttcattctccttttctgcgacttcgggcgtgggtggcgcaagctccagctgaatttttcggtcaagggcggccagttcggacttcagctgtttcagctcgtcctccttcttccacgtcttgcccgctatctcctgtaactgcggtatctcgcgctccagcgtttcgtttttcgccttgtactggtcgatgattgccggtatcttctccaaagcgttcaggaaattgaccgccgcagcgtgcgtgtccgccatcgccagatgcccgttgttgtaggaatacttgtagttgccctcgatgacaaagcggttgtcggtaaactccagtccctctttgaacatccgctcgctgacaacttttatcgggaagccgtacagctcgccgatgcgtttgggctgaccgcccgtcgcggcgttcctggctatctcctgcaaccgcttgccgatggccttctcgtcggcggtgtccagcccgtcaatttggattggattgagccggttgccctccttgtcagtctgtacggcggcggtgaacttctcccagtcctccgtcatgccggcgatgaccgcctggttgttcctcagcgccgaggtcttgctctccagcttcagctccgagtcgcgcctgcccttgttgaaggacttgcgttccccttccagcgaggcgattttcttttccagcttcgccttgtcgagcaaatccgtgttgcctgaaagaatagccatgtattcggaaaaattcatgcccgatttctcgtccatcgccccctcgtcgatggttcgtgcgcccatcgcgccggatttcagctgcgagatgaacgtctgcttgcagtgcagcaggttgaacttgtacgagtccagcgacttctccacggcgtagatgatgacgtccaccttattgtcggcatacagcttggctatctcgttgcctttccggacggcccgtccgtcgcgctgttcgaggtcggacggacgatcgggtaggtcaagggcattactgccctcttcccccctcagaaccgtacgtgagggtttcccctcatacggctcaagcttttcaaagtctctgttcgtgtgcagagaccggctcatcctacttcttgtttccattgtttttacgggataatttgaaacattcatcatgaaccaacagattgcatttccgtccgtcttgtacggtcggcattacattccatgccttatgcgtgtcaatcggttcaccacatatcggacatttccgaccttgcttttcccataggtaaagcagggatttacgtcctttcagcgtcacaagcatctttgacttcattcttttattgaagtacaggcggcagtctgcgtcaaacggattcatgtccccctttatctgcgtatattgcagaaaaggaaacgaagatgccagtttcaacaaggtaagttggtcttctttgccgtttgatttcttgaacttagccgcaaaagtccagctgttccctcggatattgtgccaatagcggtcttttatccactgtttccctttcttggaatgacggcgtttagcccattgccacaaggcgagaaatatctgatggtcgattctgtgaaaagaatcacgtgtcgccccatgctgataatatgctccccatcctcgaattttagcattcaacatcctgattaatgattcctgcttgcaacccttatgaccttttgtcaccttacggatattctccataaagcgtttttcggctttcttggtcggcttggtcaatatttcattgccgaatttgcggatgttgaaaccgagaaaatcgaaaccgtcacggatattggttatcaccgtcttttcttctgataaggtcagacctctttcagacataaagtcggctaccaatggcttgatttccttttcaagtgtttcacggttctcgcaggtaattataaagtcatcagcgtaacggacaagattcaccattggcgaatataacttacccttgattctaactcgtttatatttctctgcaaggactttctgcaatccgtccaatgtcatattggcaagcgtgggagagataatgccaccttgtggcgttccctcctctgtcgggaacatctgtttgttgaagatatagccgcatttcaaccattttcggagtattgccttgtccatagggatgttggcaagcagccattcatggctgatgtggtcgaagcacccctttatgtcaccctccagaatccattcgggagaatagccttttcggagaatgttatggcattgcattaccgcgtccatacagcggcgttccttgcggaaaccgtatgaacgtgagtcggctgttgtttccgacactggttctaatgccataaggtagagtgcttgcatggctctgtctttcattgtcggtattcccaacggtcgcagtttgccattactctttttgatgtggactcttctcaatggcttcggctggtagcctctgcgtttgagttcgcttatcgcttgtgtttttgcttcgggtttctcccatgtttccatgtccactccgggggtgttgccacctccgttagaagtaactctctttacggctaaggcttttgcgtaaaaagagtgggtcagcgtccactgcaaggctttcaccttgttgtatctgccttccttctgagcctttacaattcgtgcttgtagctttctgacagccaactccgctttcgtccagtctattctgtcccaaagtgtttgctgattgtcagcaggcgcacacgacgtcttgttttcgttcatttgctttcctccttttgaaagttctaaaagttaattgtaaagaatcaccatttgacaacattcggtttgattgcctacctaatgtcgtcacagaagtctgcccactttcgtgtcggatgatgtcgcccacatcagcccgtgatgtcggttcaatccgtatccgctccattacagaacggcattcgctttttctgttatcttatacctgcacaccgttcggctttcattgctgtcagcttacctgtcatttttacatgacaggagatatacaggcttaccatgttccacatagataactaacggataggttaggttctgtctcatcctccggcggtgcttatatccgtgtaatcctaccatggagaggattaaccgaccgcatcccttttgggtagagtgtgccagtatcttacactctttcgtgacattacgaagtttactaacagttcgcttgcgctaaccatactatccagcctcgccactctacggtatgatactaaccgtacttgacttcccctcacggttctgtcttgtcttgcgaaagtgtactttgtcccgaccgcttaatacaacattaaggtgcatcggtcggtaggctaccgctgacggaacagcgggttaaaactgatacccgtaagtatcattccaacaattatctatgcgacttcatgtcgcacccagggcgtgtccaggtggtggatggccaccgccctgcgctgggcgttcacgcccgtgccgagcatacttgtcgagccgaacagcacccttacatggccctcgttcatcgcctctatcaccgccttgcgcgacttctcgttcttgcactcctggataaagcggatctcgtgggcagggatgccgtggtcctccaccagcttgcgcttgatttcggtatagacgctccacccgccgcccggctggtacgtgccgaggtcggagaacacgaactgcgtccccttgtgcgcctcgtaccggtggtagtattccgcaatcatcctggcgcaatggctcgccttgttgtccggatggtcttcatacgccgggtctatcatgcgcatgtccagcgccatcttcctggcatagtccgtggcgatgagcatcttcgccttctcttccgtctctgacaggggcagcctgcccagaagggtcgcgtcgccgcttttggcgaactgcatcagcttttcgatgaaagcctcctggtcgggcgtgggcggtatgtggtgcagtatctcgttcttagccggacggtccacgcccacgtcctccgccgtgcggtagtccgttatctcgttgtagaacgccgccagctccggcaccttgatgaagtagcggaagcgttccttctgcacgatgttgttcgtcacgttgaactcgaagtcggtcgtcttcttggcgaagatggccgcccatgcgtcgaagcagcggatgtcctgccgctccagcgcctgcgggcgcaggtatttgaacagcaggtacagctccgtcagcgagttgctgatggtcgtgcccgacaggaaggtcgcgcccaggtcctttcccgtccgctcctgtatggtgcggatggcgaacagcaggttcagcgccttctggctcccttcggagttgcccagccccgccacgcggtcgtgccgggtgttgaacgtcaggttcttgaactggtgcgactcgtcgatgaacaggtggtcgatgcccatctgccggaagtccgccacgtcgtccgtccgcgacttaatcgcgtgctccaccttttcgagcttcgcggtcaggttgagcttgcgtttctccagccccctgagcatcgcacgcgagacgtccttgccctggtcgcgcaacacttccaggttttcctccaccgtgtccagctccgcctgcaggatgcgctgctgcaattccggcgactgcggtatcttgccgaactggtcgtggctcatgattacgcagtcccagtcgttgttgcggatgtcgttgaagaagcgcacgcggttcacggcggcaaagtccttctccgaggcgtagaggatgcgggcgttgggatatgccttgcggtaggtctcggctatctccctcacgttggctttcagaccgatgatcatcggcttgtgcgccagccccaggcgcttcatctcatgcgccgccacgcacatgatgagcgtcttgccggtcccgacctggtggtcggctatcccgccgccgttctgtttcagcatccagatgcaatccttctgcgagggatacaggtccgctatgcccagccctttcaggtccaggccggggaactgctggtgcgagccgtcgtatttcgggcgcacgaaacagttgaatttattgttgtacatgtccgtcagccgtttcttgaagtccggcgactgttcttccagccattcggtgaagccgttccgtatctcgtcaatcttcgcgttggcgagctggatgccctcgctgtcgcgtgccttgatgtcattgccgttctcgtcctcgccgaccttcttcatcatgtccgggcaggtgttgtgcagggcgtgcttcagcaggttcatgccgtcatagtggcggtaatagcctttcacgaggaactcgtcggtgattttcatcgtcttgtggtcgcacgacaccgaatactcgtcgaggctttccgaataggttatcttcacgtccgtctcgaacaggcggctcatgtaggcggcatacacgcccgtgggtatccaccgctccccgaagttgaagtccaggtcctcgaaagggatctgttcgggcacggcggctttcagggcggagagcgactcctgcgcctgcggcagcatcccgtgtccctcatgtccccttatccagccttccacgtcggcggtcttctgcaccacgtttccggcgatgaagcggtcggcggtctcgtatccgtccgccagcgggttgtagaacacgcggcctttcagggcttccagcatatccgcctgcggcatgtcacagacggattccatatagggcaggttcacgccgccgtactggttcagcgaggcggacagggcctcttcgggcgtttccaccccggccaatgtttcctgcgaaaaggaaacgggacgctcgaagatgtccgcctttacgaactgcccgtcctccccgcgttccagcgagagcatgttgcgccccgaagcgtccatcaggatgagcttcgcgttgtgccgggcgttcaggtagccgtagcgcatgacaaactcgtcgtaacaggtgttcaggtggcgccgcagcagggtgttctcctcgtgtttctccgcttcgctggcatagagccgctcgtaggcgttgcgcacgtcgatgtagagctgtgccttctgtgcctgcatcccgtccatgtcgagcggctggaaggtcgccccgtaccgggtgacgtccttcagcaccccgatttggaaacggatgccgcccgtgtgttcccatgccagcgagccgtccttcaggtgcggttccagtatgcccttgaaaggccggggcttcagggcctcttccttcctgcgctgccgttcttcgggtgtcagggcggcttcctcctcgcgcatctccctttccacccgctccacctgtttccgtgcccgcacctcgaaggcgttttccaccggatagactaccgcagcagtagtatcctgcggttctgccgttttcccggcatcggctttttctcttttcgcctccgttgttccggccgcttgtccggcggcattgacttccatctttccctttcccaaccggcgcagttccgcacgtttttcgggggtgagcgacatcatcagctcgtagaagccgttgatgggcgggttggtttcccagtccagttcgcggtagagcgcgtcttccgggtcataggcttcggcaggctctgccgggaccggttcgggcttgggcttttctgcctttgccggttttacctccgcctgtttcagttcggcgggggagaacagcggaagttcggtctgtttttctcttctggcggtcttgccgcgtttgggtttcagcccgcgttccgcctgcctccgttcctcctgcgtgtaaccgaacaggtcgtacaggtccatgaccggagcctggggctgtacgggctttgccttctgtaccggtttctcttctcttttcacctccgcctgtagcggttggaccgcctgcgtccggactgcctgtacgggttccgaagcggtccgctgcttttcccggatgccgttgtagcgccccaggtccagccgtgccgacaggtcatccgagagcatcttgtacaggtccgctgcaatgccttccacaccgccgctgtgcgtgtaaaccatcgccggtttgccgtaggggtcggtggcccgtttcgcgtcggtatgtacgatgcgctccggatgataggcgaaataggcgttgtccgtcagcccgctgttatgttccgtctggatgatggtcagtacccgttcttccggagtcagtacctccttttgcaggtctttctgcaggataatcaggtcgctgccggcttccgtgcccgcattgtcggtaaacaggttgttgggcagacggattgccgataccagattcgccttgctgaacatctcgttcctgacggataccttcgagctgttcaacaccccctgcgaggtgatgaacgccacgatgccgccgtcacgcaccgcatccagacctttcaggaagaaatagtcatggatggctttctgtgccgaacgtctgccgaaagatgcgctgcggctgaactccgggtcgaacacggcgatgtccccgaacgggatgttggaaaccgcaaggtcaaaatggttcaggaacggcttttctatcttctcaaatccctccgtgcgtatcttctgctgcgggtacagatgtcccagcagtttgcccgtgagcaggtctttctcaaaggccatcacgtccgcctgcggattgtccgacaggaccgagccgatgaacgcgcccatgcctgccgacggttccagcacggtggccggacgtatcttgcggtcgtacagcacgtcggctatggtgtccgtgacggttttcggggtgtagaatgccgtcagcacggagactttcagcgagtccatataccgcttgtattccgtttcgtccttgctgttttcccggataaggcggtgcagctccaccgtcggggcgaacagttcgaggtcggatttcgcccagtgcacggcgtccgtcagttcccgtgctggattcagtatgcacttcagtcccccgaagccgcagtaccgctccagcagcacacgttccctttcggtcgggacgcgctgctccttgtccaacaggaacgccgtgcgcaccgcctcgatgttgtcgcggagtctctgttttctgttaaacgccataagcctccagataaagcactacggcacccgtcagctccgtatagagcaggtcatgtccgggcgacagggcgaaggtgtcatccgtggtatcatagccgtcaaaaaggggtttcagataggggtaaatctcccggcagaacgcctcgcgttcctgttcctgcacctcgtcggaaaactcgttttccaccacctcaagcagcagggcgtagggagagaagtgcagcccttccagcaggacgcgcatggcttccttgtgggcggactccaccgtacttcctgccagcctttccttttcgtaggttcctgtggcggtttccccgcgcgtggcgatgaaatccgtatcggaaactttgtcggggtggtattttttcaggtagtccagcagataaagcccatagtaggacagttccgccggagcttgtctgtcagtctgtttcattttcttgatggatttagtggatgaatgaatggaatttgaaaggaagaaaaaaggcaccgggtatccctcccggtgccgccactaaatccatcgtaaaaaacagtatcaacgtcgttaaaactgattatgaacgatgaattagtggcaaagttaatcattattttcttcttcctcctttcttgttggcggattttctggcgcccttactctccgggaatatgaatttcgtgttgaagtccgcgtcgaacgtgactgtcgcactgaacggcttgccctgtttgctcttgaagccgcccagcacgtttgtctttccgtttttcaggaggtcgtccgtttccgcgtcggtgagcgtccggcctgctatctggcggaacaccggcagggcgcagtccgggttgtcgcagcgcaccaccttgccgtagaactgcatcgtgcccttgccgcatttggggcaggtgcagcccgatgccttgtggccgaaaatcttgtcacaggcgagcagctccgtggtaatcttgcgggtatagcacccgatgtcgcgcaggaaagcctcgtgcgacgttccgcccttctctattttcgccagctccgcttcccagcgccccgtcatctccgtgttggcgatgtccatcgccttgacgatggaatacagggcaagccctttctccgtcggcacgagcgacttcttcacgcgcaccatgtattcacgtttcaacagggtctcgatgatggcggcgcgggtggcgggcgtgccgatgccgcagtccttcagggcctgccgcacttcctcgtcctccacgccctcgcgaccggcgttctccatcgccgccaacagggtgctttccgtgtgcagcggcttcgggcgtgtcaggccggaactcatcgaacagccgttcatcgccaccgtgtcgccctctttccaatcgggcagaacggtgtcttcccggtcctcgccatagaccgaccgccagcctgcctgacgcacgatgcagcctttcgcctcgaactccacgccctcacagtccgcccggacggtagtcgtgtccttgacacactccggggagaatgcctcaatcatacgccccacaatcatatcatagatgatttgctcgttcttgtagagcgccagcgggcggttgggcgtcaccagcagggcgtggtggtcggtcactttcgcggcgtccacgctgcggcggttcagcttttccaaagcttcaatcttctccgcaaacgacgaatggccggccagacggtcgaacagcaggggcacttcggcgaacacatcctccgggatatggcggctcgatgtcctcggataggtgacgagcttcgcctcatagagcttctgcaccagttccagggtctgctccgccgtgaagccgtggcgggtgttcgcttccttctgcaatgtggtcaggtcgtagagcagcggagggttctccaccttttccttcttctcgactttggtgacggtggcgcacatcttttcctttaccttattatatagggccgtggcttcctccttgtctttccatttctccaccgaggcgaacttcacgatttcacttgcgcttgccgacggcgtggtgaaatggagctggtgtaccggctccggctggaaacgcttgttttcccagaaacgcttgcagaccatcgccagcgtgggtgtctgcacccgtcctacggaatacgtgccccgcccggcggcgacgctcaatgcctgcgtgccgttgatgcccaccagccagtcggcttcgctgcgggctttggcggcgaggtagagggcgtcgtattcgtgtccgtcccgcagttccttcaatcccttgcggatggcggcgtcggtcagcgagctgatccacaggcggcggaacggaagggtgcagcccgtgtaggcatacaggtaacggaatatcagttctccttcgcgggcgcagtcggtcgccacgatgatgccttcgctctcgttccacagccgggttatcaccttgatttgcttcaccgctgccgcgtccgccttgtagcctttgtccgtcttcacctgacggggaatcagctcgaaccgctccgggatgacaggcaggctgtcgcgtcggaagcccttgacgccgtatccgtcgggcagggcaagctgtaccagatgccccagtgcccatgtcacgtggtagccgttgccggtgaaatacccttcttctcttttcatcgcgccgacgatccgtgctatctcacgggcgacgctcggtttctctgccaatatggtaatcatgtctttctttgttttaatcgttgttgatactgttttctttcgggtgaaacggggcacggccttgcccgtgggatatgcggtacacggtcgcgtgcatccccgtttcacgccgttgtctgttttcttatggattcagtggcggcatcataccttcatgcctttggatttctttgtctgctgtttctgctgggcagtgtccttcggggcggtctggccttgctgcaacggctccttcacgtgcctggtcgcctcgttcgtcttgccctcgttgttcacggcgagctgcgtgcggctctcgttggacggggcgacggtctgcgccaggtcggggttctgcgagtaggtcagcgggcggcctttctcaaagctgaacttgagatacttcgtgcagggttgtccctggtcgtctttggcattggcaagcaccactaccttgcccgccacgtagtcggctttctgctgttcggtgaaggtgtcgtccttccatttgccgatgggtcggatgctgccgtcctcgttggtccatgagcggcgctggcgttgcccctcgccgttttcctgtttctgaccttgcgcgtccgtattttccggttgttttcccggaccgtttccctggcgttgggcttgttgctgccttggctgccccggcacgaactccacgtcgcgcttgtcggcgttcacctgcaacagggcctggaacttgcgcccgttggaaagcgtgacctccttgggcagggccaggcctgcgcggaggatgtcctgctcggctttcgagagcggcgtctgcccgatgcgggagggtatgcgcaccttactggccggtacgtccacgatttcattggtcaggcggtcgatgctgatgtacgagggcttgatttctcccgtcttctcgtcggcgaagttgatgagcctgccgaggttgcccgtctgtttcaggttccgcttgtcctcgtcggtgaacggatagcccctgtgggggatgtccaggcgcggctcgttgcgcacgaagtggggagtgagcttcaggctgccgtcctccgatttccggaacgagaggcgggcttgcagttcgtaggtgtcgccgccgaagtcgggcttgaccgtgaccagtcccgtcttgccgtagttcatcagggctttcaggtccttctccgaaagttgttccctgtcgatgccgcacttgcgcagttcctcccagtccacgtcattgtccgctatcaggttcggcttttcagaccttacctgctgttgcccttcctgtacgggttcctgtctctgtgccgcttgcgtttccgctgcctgcggctgctgattctgtttcatttctttcattttctcgtctgttttctgttccacatggttttcttccgtattttctcttttcgcctccgctgcctgccgttccgcagcctgctgatatgccgatgtgtctaccttgtgcggggcgagcatttccgcgttggccaccgggtctttcagcaggtccttgataaccgggagcagcgcatccaccgtgtccgccgccacccggtagaagccgaaacgtgtcggctccttgcactggcggtagaagttcttgaagaagttgtcgatcacgtccccgtggcggtcgaagcgcaggaagtcctgcgagtgttcctacttggcaggcgccgtcttgggatagccattcccgtccagtccggcgaccacgctgatttcgcccgtcttctcgtcgcggaccaccaacacgtcctcttgctttttctttttctgttccattgtcatttacgtttatggtttactttgtttttaccggtattccttttcatcccggatgttttttcctgtctgctgtcacggagaatttccttcatgtgcgtgctgatgaacagctccacgtccgctttgcggtagtaggtcttgtgacggtgcatccggtaagggagcagcccctcgctacggtagcgttgcaaggtacgcttgcttacccggagcatcatacacacgtcctggttgtccagggtatcgtcttccgcaataccaccagctggcggtttcccgttcctttcctcctgtatggaggttatcagttcctgttgtctatcgaggcggatgaacacctgcctcatacagtcctcgaaagtctgtctgtccagaaattccatgattgtcctcctttcaggtcttgccaggttttctgcccgtgcggagcaggtaattgtgcctcagttcttccagtttctcaggcgatgccttgatgacattttcgccgatgatgcgttctacctcatcggaaggataacggcagttgccgcggatgatgacatatctgatgcttttctcgtttctgagccgttgcaaggtgcggcggctgacacggagcagacgcatcacttcgcggctgtcaagcagaccggccgtgtcctgtacccgttcctccggactgtgtttcctcacatgggaggcgatttcctcgatgcgccctacgatgtccttgtaggcggcgctttccatcgtgatgatttccatgtttctaatcgctttttaattgtttgtatttcaatttgtcgggagcaaatttcggggatttgcaagaggcgggcacggtacttacccgtaacttacgtgagatttttatggatttccttcccttgcgggagtccagccggcggaaaacggcagacagcatacggaagaatacattgcctgcatgtcttcaaccggcactatgaacgaagccacaagctgccattacctccatattcggtaagttccggcataagcaaacgtaactttgccgcaaatcgataaaattttggatatatggaaatagtaatcattgaaaaaaacgccttcgagatgctccttgccggggtgaaggcgttggaggacagggtcaggatgctcgccgaaaagggtggagaccaccgccttgccgagtggatggacacggaggatgtgtgccgtatgctgcgcattactcctaaaaccttgcaggccatgcgtgatagacacatcatcgcgtattcgcaaatcgggcgcaagttctattacaggccggaggacttggaacggctgttgcctgttcccgaaacggggcaatcgcccgtctgacactggaatcgtaccactaaatccgatgtaagatgaacgacagcgtattgacaagggactgtgaggtgatagccgatgccatgcagtccatccgaagaagcctgaaagtggcggacaggctcgccgacggctatattccaccgatgggcggcgagcgttacctcaccgacagggacttggtggaaagactgcacgtgagccgacgtaccttgcagcagtaccgccatgaggggatattgccttatttcctattcggagggaagacgctttaccgcgagagcgacatccagaaggtgctggagcgcaactaccacaaggtgtattgacaggatcgggagacggacaacccgtgcggttgccgcctcccgataatcatttaagactgtacttgtgccgttcagcaatatgacccgtgcggatggtgcaggaacaagaccataggctctttattggaacgtgccaccgtccaggcgagccatttgcggaacagtgccgcctgccccgtgtcgaacctgaacgacagggctatgaccgttccaatgtcatggatgtctgtatatccatttgcttcaagccgtatgcgtcggcatgaactgccgtccgcaatgccttccttttgcagctttcttatggcggcttccactgacacgccgcgcacatagaacaggtttgcgatttccccggtcgtcatccacacttcggtatcgggtatgattaccgtcttttcttctattgttatgatacctctcgttttcatgtttttttgtttacagatttcgtttctaaatagcttggcagatgaacttctccatcggggcgagcttttgggaaagcagttccatgtcccggctcatcttctcagccgtgattttcgcatatatctgggtcgagcggatgctcgtgtgccccatcagtttcgacagcgtttctatgggtacgccgttggagaggcatattgtcgtggcgtacgaatgcctactttggtgccacgtgacgtttttgtttattccgcattgtttggctacctgtttgatgccgttcttgcagttggcatagcatgggacaggcaacagcttgccgtctttggaaacgcctttgtacttgtcgatgatgtgcttcgctacgtccagcaggcggatgttcgtcgctactcccgttttctgacggctcgtctttatccacaaatgcccgtcgaaggaaacttgcaggttctcttccgtgaggttcgccatgtcgcgccagcttaaacccgtgaagcagcagaagatgaacaggtcgcgtatcaacccgtagttctttcgtttgaacgtgccgtttatcatctgcgtgatttcctcttttgtcaggtagccacgtttggtctcttcctttgtgatatggtaggcatagaacggatcacgttgcagccagccattgttgatggcagtgaagatgatgtttcggaaaggcatcatatacgaccacacggtattagtgcaatgtcctttctccacgcggaggaacagctcgaagtccgtgatgaaggcgggtgcaagctctttcagggcgatgtcctccaccttgtacctggttttaatgaactccgacaagtgcttgtaaaccacgcagtatttccagtaactgcgttggcttttcatcttgcccactaattttgcatagtcctcgttgtgctgtcggaatacggcaagcagtgtcttgtggttcatgcccatgccgaggtattcgttgcgcaccttctccgccgtgacataagtgtcacggtcgaacacgtcctgataggccttgttcacacccacgcggattttatccagcatacggttgccttccaaagccacgttgctccttcccgtcagccgcccggtctccacgctccacatcttttcctccacgtccagcttgcaactgaactgtgcgattttaccgttcaccgtgatacggcacataaccggtatcagtccgttcttcttcggcgcattgcgcttcaggtagaataaaatcttgaatgttgctctactcatagttactaatttttatgtctgcaaaattactttgtgtagagctgtctgcttgtatgtaaaccgccgcggaccaaggcaatcgaacctgccgcaagactttttcgtcctctaaccgtacaaatgcttgtgtgagtggtatttttgctcaggtctgccgccttttcccgtgtcgttactgcggcttgaatccggtaacgggatagtaacgcaattccggttcaagttggcatttttacggtttcagttggcactcactcaaaacgtcaaaacatcataaatcattaactttcaatcatatttccgtggtttgctcagtatctcacttttttgtattatctttgcaccaaatataattacatacaacgaatcagtcatgcgattaacattacgaatcctttccctgttgttggtgctgtccgttaccggaacggcactcggagccagccaacggaaagtgccggcatacgaaaagtatatcaaacaatacagcagtttagcgatccagcatcaaaaaaagtaccgtatccctgcaagtatcacgcttgcacaagggttattggagtcgggagccgggcgaagcgagctggcacgcaaatcgaacaaccacttcggcatcaaatgtcattccgactggaggggtgggcgtgtctatcacgacgatgacctgcgcggagaatgtttccgcaaatataagaatccggaacagtcttacgaagaccacgctcgttttctggtcgaccgtccccgttatgcctctctgttcaaactgaaaataaccgactataaaggttgggcaagaggtttgcaaaaatgcggatacgcaacagaccgagcctacgccaaccggctgatcaagctgatcgaagattatgacctgtaccggtatgacacggcaaaaggccgtaaaaagtcagacaagcaaccggcacacatctcccgctatacggtctaccgtacaaacggcctgctgtatgtctattccaacggcaaagacagcttcgacgacatagccgccagtctcggcttccgggtaaaagacctgaagaaatacaacgaggtgccggaagattttccgttacagaaaaatgacatcgtttacctggaaaagaaaaagaagaaagcagacaagccgaattatgaccatgtcgtacaggtaggcgaatccatgcacagcatcgcacagaaatacggaatacagatcaagagcttatataagatgaataaaaagcacaaagattatattcccgaagaaggagatgtgctaaaacttagataagtaagacaaaaaatagtatctttgcagacaaattcacaaaaacaatgagtgaccaacgttataatctacgcggtgtatccgcttcgaaagaagatgttcacaacgcaataaagaacatcgacaagggaatctttccccaagcattctgtaagatcattcccgacattctgggaggcgatcctgaatattgcaacatcatgcatgccgacggagccggaaccaagtcatctttggcttatatgtactggaaagaaaccggagacttgtccgtatggaaaggtatcgcgcaagatgctttgataatgaatatcgacgacctgctgtgcgtgggcgccgtagacaacatattggtttcctccaccatcggacgcaacaagctgctgattccgggtgaagtgatctccgccatcatcaacgggactgacgaactgctggccgaacttcgcgaaatgggagtcggatgttacgcgaccggcggcgaaacggccgatgtaggcgacctggtccgtaccatcatcgtcgacagcacggttacctgccgcatgaaacgtgccgacgtgatcgacaatgcgaacatccgtccgggcgacgtgatcgtcgggctggcttctttcggacaggccacttacgagaaagaatataacggaggcatgggaagcaacgggctgaccagtgcgcgccacgacgtttttgccaaatacctggcagaaaaatacccggaaagcttcgacaaggctgtccccgacgaactggtttacagcggtggcttgaagctgaccgaccctgtagagggatcgccgctgaacgcaggcaagctggtgctttctcccacgcggacctatgcgccggtagtcaaaaaactattggatgccttgcgcccaaatatccatggtatggtacactgctcaggcggcgcacagaccaaggtaatgcacttcatcggaaacaattgccgtgtggtcaaggacaatatgttccccgttcccccactgttcaagacgatcaaggaacagagcggtacggcctgggacgagatgtacaaagtgttcaatatgggacatcgcctggaagtctacctttctcctgagcatgcggaagaagtgattgccatcagcaaatcattcaatatcgacgcacaagttgtcggccgtgtagaagaaagcgacaagaaggaactgattattaaaagcgagttcggtgagttcatatatggctgagaataacacgctattagagaaactggacggattggtatcgcgcttcgaagaggtatcgacactcatcacggacccgaacgtcatcgctgaccagaaaagatacgtcaagctcacgaaagaatataaggagctgaacgaaatcataaaagcccgcaaggaatatatgcaatgtctcaacggcttggaagaggcccgcctgatgatggccgaaaccgatccggagatgagagaaatagcccgcgaagaagcggctgcctgcgaagcgcgcattccggaactggaagaggagatcaagctgctcctcgtaccggccgacccgcaggacgacaaaaacgccattgtcgaaatacgtggcggaacgggtggcgacgaagccgcactctttgccggagacctgtatcgcatgtacgtgaagtattgcgagatgaaaggctggaaagtggccttgtccagttgtagcgagggagctgccggcggtttcaaggaaatcatctttaccgtgagcggagaaaaggtgtacgggacccttaaatacgaatcgggcgtgcatcgtgtacaacgcgtgccggctaccgaaacacaaggacgcgtgcatacatcggcagcaaccgttgccgtcctccccgaagcagacgaatttgacgtggaaatcaacgaaggcgaaatcaaatgggacacgttccgttcgggtggagccggaggacagaacgtaaacaaggtcgaatcaggcgtccgcctgcgctatgtctggaagaacccgaatacaggcgtaagcgaagaaatcctgatcgaatgtaccgaaacgcgcgaccagccgaagaacaaggaacacgccctcacgcgcctgcgttcgtttatatatgacaaggaacaccagaaatatctggatgacattgctaacaaacgtaagacgatggtttccaccggcgaccgctcggcgaagatccgtacctacaattatccgcagggacgcatcaccgaccatcgcatcaactacacgatttataatctttcagcctttatggatggggatatacaaggatgcctcgatcaactgatcgtggccgagaacgctgaacgactgaaagagtctgaactataacatcatttttagactaattttttacacgtaacaacatgaacaagcagcaattattcgaaaacatcaagaagaagcagtccttcctttgcgtggggctcgatacagatataaagaagatcccgcagcatctattgtcagaagaagatccgatcttcgcattcaacaaagcgattatcgacgcgacagccgattactgcgtggcttataaaccaaacctggccttctatgaaagtttaggcgtaaaagggatgctgtcgttcgaaaagactgtcgcttacttgcgtgaaaactatcccgaccagtttatcattgcagatgcaaagcgcggggacatcggaaacacttccgaaatgtatgcacgttctttcttcgaccatatcaaggtcgacgccgtaacagtcgccccgtatatgggcgaagacagcgtgaaaccgttcctgatctatcaggaagcctgggtgatcctgctggcactgacctccaacaaaggctcgcacgatttccagttgacggaagatgccaacggcgaacggctgttcgaaaaggtattgaaaaagtcgcaggattgggctacggacgaacagatgatgtatgtggtaggcgctacccagggaaaaatgttcctggatatccgcaaacacgctcccaaccacttcctgctggttccgggcgtaggcgcacagggcgggagcctcgccgaagtggctcagtacggcatgaacgaccagtgcggattgctggtaaactcttcccgtgctatcatatatacagacaaaacggagaattttgccaacgcagcacgtgaagcagcccaagccgtacaacgcgaaatggcaggatatctgcatgataaaggaattattccctgcaaagcataggctatcccaataattttcaccatttttgcaaactgccttgaagcaagtccgggcagttgcatttgaaatacatataataagattaagtaatggagttttcagcccaacaaatagcgagcgttttaggtggaaccgtcgaaggcgatcctgaagtgaaagtcaacaacttctcaaagatagaagaaggtaaaccggggacattgacctttctggcaaaccccaaatatgaacattttatctaccaaactgaagcaagcattgttttagtaaacaatgatttcactcccgccgaaccggtaaaagccacattggtcaaggttgccaatgcttatgcttcgctcgccatactgttgaatatggtggaacaggccaatgtcaaaaaagcgggtatagacgctacggcgttcatcgccggttcggcaacggtcggcgaaggatgttatgtcggcaacttcgcctacattggcgaagacgtgaagatcggcaagaacagccgcatttatccacacgcttatatcggcgaccatgtgaccattggcgataactgtacaatctatccacatgcaaccatctacaacggctgcgtaatcggcaacaactgcattctgcacgccggaagcgtgatcgggtcggatggtttcggcttcgctcccgaaggcgataactacaagaagatcccccagttgggtaatgtcgtattggaagacgatgtcgaaatcggagccaataccacgatagaccgtgccgtgatggactcgaccatcatccgccggggtgtcaaactggacaatctggtacagattgcccacaacgtggaagtcggcgaaaacacggtcatggcagcccaggtaggcattgcgggttccgtaaagatcggcagccattgcatgtttggaggccaggccggactatccggccatatccatgtggcggaccatgtggtattcggtgcacaatgcggtgtgatcagcgatgtaaaagaaccggctaccctgttaggggctccggctatcaacgcaaaggcgtttatgcgttccagcgcaatcttcaaccgcctgccggatatgtatcgccagatgggacagatgcaacgtgagatagaacgactaaaatcggctattgacaatgtgcacaattgccaatgaacaaatcataaattataaatcataaatcatatagatcgtatgcagaaacagaagacgcttgccacgagtttctctatgcaaggaaaagggttgcatacaggtttggatatccagattactttccatcctgcacccgaaaatcatggatataaaatcaaacgtgttgacctggaaggagaacctgtaatcgatgccgttgctgaaaacgtagccggaacccagagagggaccgtactttccaaaaacggaatccaagtaagcaccattgaacatgcgatggcagctttatatgcctacgaaatagataactgcctgatagaggtgaatgcacccgaattcccgattctcgacggcagttcccgttttttcagtgaagagattcagaaagccggtgtcgtggaacaaaacgcaccgaaagattactatatcgtaaagcataagatcgaagtcaaggatgaagaaactggttcttccctcattatcctgccggacgacaagtttagcgtcaatgttttgatttccttcaattcgtctgtgctttccaaccagttcgccacgctgaacgacctgagtgaattcccgacagaattggctgcttcccgcacattcgtgtttgttcgcgaagtagagatgctgttgcagaataacctgatcaaaggcggtgacctcgacaatgcgatcgtcatctatgaccagaaagtatcgcaggaggtgctcgacaatcttgccgacaagctgtctatcccgcataaggacgtacaagacctgggctacatcaacaataaaccgttggtattcgacaacgagccggcacgccacaagctgatcgatgtgatcggtgacctggcactgatcggcaaaccgatccggggccgcgtaatcgctacccgtccgggacataaaatcaacaaccagttggcacgcatgatccgcaaggacatcaaacagaacgaagttcaggctcccgtctatgatccgaacagcactccggtaatggatatcaaccgtatccgcgaactgctcccgcatcgttacccgttcctgttggttgacaagatcatcgaaatcggcggtaactatatcgtaggtgtgaaaaacatcacgagcaacgaacctttctttacaggtcattttccccaggaaccggttatgccgggtgtactgcaagttgaagcgatggcccagaccggtggattgctcgttctgaattcggtagacgaaccggagcgctattccacttatttcatgaagatcgacggcgttaagttccgccagaaagtcgttccgggcgatacgctgatcctccgtttggaattgctggctcccatccgccgtggtatttcaaccatgaaaggatatgtattcgtaggcgataagctggtcagcgaagccgaatttatggcacaaatcgtaaaaaataaataaatcaatgatttatgatttcagatgtatgacttatggtaacgacatgatacgataaaccatacatccgaaatcataaataataaatcataaatcattatgaacatatcccctttagcagtcgttcatcccgaagctaaaatcggtcagaatacaacagtcgaccctttcgccgtaatcgaaaaagatgtcgtgatcggtgacaactgtcgtatctattcgcacgcgactattttagacggcgcacggatcggcaataattgccaggtatttcccggagccgttattgctggtatccctcaagacctgaaatttaaaggagaaattacaactgccgaaatcggaaacaacaccattctccgcgaatgcgtgaccgtcaatcgcggaacagcctccaaaggcaaaaccgttgtcggcaacaattgcctgattatggcctattcccatattgcccatgattgcttgctgaaagataatatcattatcggcaatgcttcacagatagccggagaagtagagatcgacgacttcgccatcgttagcggtggtagcctggttcaccagttctcccgtatctccaagcacgtcatgatacaaggcggttcccggatcggcaaagatattcctccttataccctgatcggacgtgatccgatcgtgtactgtggtatcaatatcgtaggattacgccgtcgcggatttaccaacagccaagtattcttgatccaagatatctaccgtacgctttatacacgcggcctcaacaatacggaagccctgaaagccatcgaaaccgaatacgaacctagtgaagaacgggatctgattctgaacttcatcaaatcatcccagcgcggtatcgtcagaggttcgattgatgaataaataatatgccaatttgaaaatgtgccaatgtaccaatgaaagaatgaattttatggggtatattggcacattattttattgccacattgttttttttactacttttgaaccaacaaaaaactaataacgactatggtatttagatttttaattctatcagatgaagttgacgacttcaaacgtgagatcaagatcgactcagaagcaacatttctggatttgtacaatgccattatggattctgtagggtatacaaaagaccagatgtgttctttcttcatctgtgatgatgactggagcaagaatacggaaatcacattggttgaaatggatacttcttccgaagtagacaattatataatggaagatacacgtctggaagagcttctggaagacgaacaccagaagttgctttttgtcttcgattatatgactgaacgcgctttcttcatggaactccgtgaaatcatcccaggcaaagatctggacaaagccgtatgcagcaaatctatcggcgaagcacctgttcagatcatgtcgttcgacgaaatggacgccaaaacaggtaacaccgaaataggtgaagatttctacggcgattccgaatacgatatcgacgaactcgataaagaaggtttcgacgggctcggcgacggaccgatggataacccatacgacgacgagcgcttttgattaatgaactctcttgtcatattattggggccgacaggagtcggcaagacagaactgagtctgcgtgtagcagagcatttcggttctccgatcatttcttccgactcccgtcagctttacaaagaccttccgataggcacagccgctcctacggttgaacagatggcacgtgtacgccattatatggtcggcacattgtcactcaccgattattacagcgcaagcagtttcgaggaagatgtgatgtctctgctcagggaactccaccagacatatccgactgtcgttatgacaggtggtagcatgatgtatatcgatgccgtcacaaaagggatcgacgatatccccaccgtcacccccgaaatccgaaccgccatctacaagcaatttgaagaagagggtctctcacctatccttgccgagttaaaggaaacagaccctatacattataatgaagtagatcgaaacaactacaaacgcgtaatccatgccgttgaaatctgccgcatgaccggcaaaccctattcctccttccgtaccaacacccgaaaagaacggccgttccggatcatccagataggacttacccgcgaccgtgaagaactttacgaccgcatcaaccgccgcgtagaccaaatgatggccgacggcatgctggaagaagcacgccgcgtttatcctttccgcaaattgaactccctcaacactgtcggctacaaagaactgttcaaatacctggatggcgaatggacattagatttcgccattgaaaagataaaacgcaactctcgtgtttacgctcgcaaacaaatgacctggttcaaacgggataccgacatccgatggttccatccggatgaaaaggaggcgatactgtgctatttagacgccaccctcaacacccgcttgtgacacaggacgtttttcccctatcactaatcccaaacttctctatcactgtctcgtcctgatttgaagtgatactaaaatcttatttcttaaacaccagataaactgccgccaccagaaacaggaaagccagcgcatgattccacttaaacgattcgcctttgaaggcaatcgaactaaaaccgacaaagacaaccagcgtaatcacctcctggatcaccttcaattggatcaggttaaaaggcccgccattatcacggaaacccatccggtttgccgggacctgaaaacaatattcaaaaaacgctaaaaaccagctgaacaagacaacaccgatcaacggcagatgctcgaaccaactgaactgctgcttcatcttcaaatgtccgtaccaagcacacgtcataaagatattggatgcgaccaataacagaatagtataaaatccttgcatgagatgatttatgatttatgatttatgattttaggaagatagtccgcctgaatattcgacatactgctccaaaggctatagcgcgcctcagggttgatcgcctctagacgcgacagtacctccttcatatccgaacggctggagccggattcgtacgggcaattcttgatctgtttccgatatcctctccacacagcaatccgggtcaaatctttctcctccaccagacacatggggcggataatctccatatcgaacttatccatctttaggcgcggtggcatcgttccgatcgctccctggtggatcatgttcatcagaagggtttcgagaatatcgtcctgatgatgcccgagggcgatcttgttgcaaccatgcctctttgcaatatcgaacaaggctttccgccgcgtccaagaacaaaggaaacaaggagacttgcgggtatcggtcgaagcgtcgaagctcgtctcatgcacgaaaaaggaaaggccgtgctcatctgcccggcttttcaggtagtcaatatccgaacgataagggatatttgacatcacgatatgcgtcacgatcacctcgaaccgaggccggaatatcttggaacggcgtccgagcaagtccaccaacgccaacgaatcttttccccccgacaatccgatcaatatacggtcaccatccacaatcagaccatattcgaatatcgccttcttgactttctcttctactttacgaaacaggagttcctcttctgtcaactttgccatactttattaattaagaattaaaaattaagaataaaaaaataagggttttgattcttgattttaattcctatttttgtaatcggacacaaaagtaatgattttagatttatggattataaatctaaaatcaaaatcataaatcataaatcaatgaattggttatctaataaactgttttacacaataggaatcacgttactctgcggcgggctgcacgcacaaagtctggctgaagcaaaaaaattatacaatgaaggtaagtacgcggaagccaaacctgcctttgaaaagctggtcaaacaagcgccaagcaattcctcctataatcattggtatggtgtctgctgctacgagaccggtgatctgaccggtgcggaaaagcatttgaaagtagctgtcaaacgcaaagtacaagaagcataccgttatatgtccgaagtctactacaagacctatcgtttcgacgaagccggagaaatgctggaagaatatatcaacctgctggcaaagaaaaagcaggatccgcaatcgttcgaaaccaagctcgacttggcaaacaatgcacaacgcatgatggaaaaggtggaagatgttcagatcatagatagcttggtcgtggacaaagacgatttcctttccgcctatatcctaagcgaagaaagcggcacacttgattcctacaaagattttttccagacaaacgagccagtgagctcgaccgtctacaagaaccagaaaggcgacaagatttactatgctcattcgacagacggcgaccgttattgcctttttacccagtccatgcttatggacgaatggggggacgagaaacaattaccgatgaacatcaacagcaatgacgatgacaactacccgttcgtcctttccgatggcgccacgatctattattcttccaaagggaacggttcgattggcggttatgacctcttcgtcacccgctacaacatcaattccgacacttatctggctccagagcagttgggcatgccgttcaattcgccctacaatgattatatgatggtcttcgatgaagtgaaaggattgggatggtttgtatccgatcgtttccagccggaaggaaaagcctgtgtctatctcttcatcccgaatccagagcataaacgggtggagagcgaagacatagaagtgaaacgcgcccgtgcagcgatcactgctatccgagattcctggaaagaaagttccgactatgccgacctgattcgtctgtcgcacacagaaataccttatggagagaaaaagatcgaaaaggattttgaatttatcatcggtaataatattgtctattacaaactggatgacatcaatagccccgaagctaagggctactacgaaaaggtggttgccttgaacaaacagatcaaagagctgaatgaaaaactcgacggcctgcgcgtctcttacgccgaaggcaacaaggcccgcaaagagcaactgaagccaaccatcctgcaagcagaagagcaactgaacgccttgttggaacagcccggcgagttggagaagaaagctcgtaatgccgaaatcaattatctgaaaaacaaacgataaaacaaggctctatgatattcgaaatgcttattatcgccttcctaatggttgtagccattgtgcttatcctgctggaaatatttatgttaccgggtatcacagttgccggtgtcggaggattcctttttgctgccggcggcctgttctatgcctattcggtcagtacgccgatcggcaatgtaacattggcggtatcatcgcttgtgttcgcggcctctttcatctggttgttgcgttccaaatccttcaaccgggtggctttgaaaaccgacatcgattccaagctggtatccagccgcgacttgggaatcgtgccgggcgacgaagggttgacactttcacgcctcgccccaatcgggaaggcccgcattaacgggatcaccgtagaagccaaatcgatggacgagctgattgatgaaaacacgccggtcgaggtaatacgcgtcgatggctacaatgtaatcgtgaaaattaaaaattgaaaaataaatcataattcataaatcataattctactcacatggaaatgacctttgtacctctcgcccttttgggagcagcgatattgctgctggtaattttcttttattatgtgccgttccttctgtggatctcggcaaaagtttcaggtgtcaacatctcgctgatacagctcttcctgatgcgtatccgtaacgtgccgccttatgtcatcacccgcgccatgatcgaagcccacaaagcaggtctgaaaacgctgacccgtgacgaattggaagcacactacctggcaggcggacatgtcgaaaaggttgtccatgccctcgtttccgcatcgaaagcgaatattgacctccctttccagatggcaaccgctatcgacctggcaggacgtgatgtatttgaagccgtgcaaatgtcggtcaacccgaaagtcatcgacacacctcccgttacagccgttgccaaagacggtatccagctgatcgccaaagcacgtgtgacggttcgtgccaacatcaagcaattagtcggaggtgccggcgaagaaacgattctggcccgtgtcggcgaaggtatcgtatcttctatcggttcgtctgaaaatcataaaagcgtgctggaaaatccggattccatctccaagctggttctccgtaaaggtctggatgcagggactgcatttgaaatcttgtccatcgacatcgctgatatcgacataggcaagaacatcggagcttatctgcaaatggaccaggctcaagccgacaagaatatcgcccaggcaaaagctgaagaacgccgtgccatggccgttgccgtcgaacaggagatgaaagccaaagcacaggaagcccgtgcgaaggttatcgaagccgaagccgaagttcccaaggccatggctgaagctttccgtaatggcaatttgggtatcatggactattataagatgaagaatatcgaagcagataccagcatgcgtgaggcaatcgccaaaccgtcaaatgcaccttcgaaaccattaaaagactaacaaggatttatgatttcagatttatgatttatcatcaacacataaatcataaatctgaaatcataaacctgaaatcataaacctaaaatcaaatgatcgcaccttccgaacttatcattaatcccgatggcagttgctttcacctgcatctgaaaccggaacagctcgccgacaagatcatcatggtcggcgaccccgatcgcgtaaacaccgtcgcctcctacttcgatacgaaagaatgtgaagtgtcgagccgtgaattccataccatcaccggcacttacaaagggaagcgcatcacaacactttcacacggcatcggaaccgacaatatcgacatcgtcctgaatgaactggacgctttggcaaacatcgactttgcttctcgtaccatcaaaccgatatttcggcaactgacaatggtacgtgtcggcacttcaggaggattgcaaccgtttgttcctgtcgggacctatgtggcagcaggaaaatcaatcgggttcgacggagttctgtatttttatgccgactccgagaaagtgcgcgacaaggctttcgaatcagaactgatgagacaattgaaatggaagctaagcggcatccagccctatgtcgtttccgccgatccatccctggtcaagcagatcacacaagacgatattatccggggagtaacgattgcagccaacggcttctacggtccgcaaggccgcaagctccgcttgccgctcgccgatccggaactgaaccgtaaaatagaagctttcgagttcaacgatagccggattaccaacttcgaaatggaaagttcgtctctcgccggactgtccgccttgatgggacatcgtgccatgaccgtgtgctgcattattgccggtcgggtggcccaagacatgaataccgaatacaaaggttccatgaccggcctgatcgaaacggtattggaccggatctaaaagaaagctatgcattacagttgctaaccctatgggttacgcaggttaaagcatagggttagcaaccacaacgcatagggttacaaaaagccttgccctttcaagactttcagtaatacgtcggagaaatattcattgttggccttcgtataacgtacatccgtaaatacctgggccaatgttttcttatcattctcccgtacaaattgtttatttacttccaactcttccttatcgtggtataaggcatcgatagaagctgacgtataatccgtataaacctcctggtgaaccaccgctccgagtggcaagcgttccacctgttcaggcattccgtcgggatagccgaccgggactgtcacgatagggacaaccaagcgtggaagcgacaaggcatcgataatcttatctgcgttataagccgtcgttcccaaatagcagattcccaatcctttttcctctgctgccgtacagaaactttgggcaaacagcatcgcatcgatagtcgaagcgataaaagtctggaaattatcgaaaccggccactgcatcgcgcagctccgcccattttacaaaacggttggcatcggcacagaaggtgagcacgaccggagccgccgtaatcatcggctgattgaaatgggcaggagccaacttttccttatttgtcttatcgcgggtaatgaccacactatacagttgcatattccccgtattggatgcacgggcagcaacctccaacaattcattcaacaaagcatccggaatgtcctgagtcgtatatttacggatcgtccgtctgtttttcatattttccaacatagcttacatatttagttgatgacaaaatcaatcaataacaaagaccgagtgcccagacaggtattttgtttcctacactcttaggctgtccgtgtatagcggcaaacgcattttccacattcttgatacgctcataatccatcaacggatcaccgatcatgaacgtgtacttttcattcacacgataatctccattatgcaaaagctccacagtcccacaattagacatctgatcgacgaaaaacgtctcacccacgtaaacccgctccatctcccggaaaagacttgccatcagattcgtgttcgccaggaaagagcgatacgaacgggccagtgtgccgtcttcttttctgacttgtagaatgcggagcacccctatctcttttatataacccaataaccggtgtatatgtgtattatccgcctcatatttggatgtcaaagcctgcatgcggggaaattccggagcttcttgggcaagttgaatcagcaattgtttcatcttccggaacatggcattattcatctgtcgaatggcgggaaggtccacatcgatcgaatctcgcaccaaatcctgcaaacggaaattgaaggcatccggatcttcccaataaaaaggatagcaaccatgttccagataattccggaaaatggggactatgtttacttcatccaccacctgttgcgtcacttccgcatggttaagcaaaagttcgtccaacgggaccggtttgagatccaacgcaccttcataggacaaatattcacggaacgacatggtatgtaacgtataccaatcgcctttcccgtcaaaaggcatctccgtcttctctccttcaaccagcaaaggtgcagcaaacactatctgcatatcaggataatcgtcgtgtaaacactctatcgcctgtacccagctaccatatcgatggacattatctagaaaaagatgcctgcccccctcttcataaaattgcctgaccgtttcggacaacatgcaccgttcctgaaaccatatattatcgagaggcaaatacagggcttcatgagaatcgccataagccaatttgatacgctgcaacaaaagcgttgtttttcccacccctttcgctccaaagataccgatcagcctcctgtcccacttgacctgtcgggataagtaacgctggaaacccagatttacgcctttaagtaactgctcatggtttaaccaaaacatgtccatagtataactgatttgacacaaaaataatatataaaagccaatctacaaaaccaacaacttacaggaagaatagtttttttcgtacctttgtccctataaaaaccaataaacaaatggaaacgtctaaagtttactttaccaatctccgtacgaccccgtccagtaacttgttggacaagatggaacgtctcgtaaaacgtgcgggcatagcaaacattgatttccagaatcagtttgtagcgatcaagatccacttcggcgaacctggtaacctggcctttatccggccaaactatgcagcccggatggccacgttgcttcgcaacttaggggcgaagcctttcctgacagattgcaacaccttgtactcaggccgtcgcgccaatgcagtagaccatttggaaagtgcaatggaaaacggtttcaaccccatttccgccaaatgcgacgtgattatcgccgacggcctgaaagggaccgaataccgtgaaatcgaaatcgacggtgaatattgtaaagctcccaaaatcggttccgctattgccgatgcagatatcattatttctatgaaccacttcaaaggacacgagcagaccggattcggcggcgctttgaagaacctcggcatgagatgcgccagcgtaggtggaaaacttgaacttcactcggcatcacaacccagaatcgacatcgaaagttgcaagggttgcaatatatgcgtcaagcattgccgccacgatgccattcatttgaacgcttcccataaagcagaaatcgactacggaaaatgtgtcggttgtggccagtgcgtagctctttgccaatacgacggagccgtcatgggtgaaggcgacacgtctgaacgtttaaactacaagatcgccgaatataccaaagctgtcttgtccggcaagccgaatttccacatcagctttatcatgaatgtctcacctgaatgtgattgttggaaccacaatgatgcagcgattgtgccagatctgggcatcgccgcttcttttgatccggtcgcattagacaaggcttgtgccgatatggtgatcaaggccccgatcctggagactggtaaccgcctttcagacgctccgcatcacgaacatctggaaggttgcgacaaattccacctcatgcaccccgacacgaactggcaagcaggactggaacatgctgaaaagattggtcttggaacacagaaatatgaattaataactgtatagactaatggaagatactatctgcgccgtatcaactgcccccggagccggggggattgccgtcatccgcatctccggaccggaagcaatcgcaatctgcaacacgatattcgtaccgcgtacagcaggaaaaggcctgctgtcacagaaagcctatacactgcgttacggtagtatcaggcgtggtgaagagctcatagacgaggtgctgatcgcccttttccgcgcacctcattcttttaccggcgaagacacagtagaaattacctgccacggttccgtctacatccagcaacaaatcatgcaacttttgattgaaagaggttgccgctccgccctccccggcgaatatacgcaacgtgctttcatgaacggcaagatggacctgagccaagccgaggcggtcgctgacttgatcgcctcgacctcagccggtcaacaccgcttggcattaaaccagatgcgcggtggtttcagccatgaattaaagaacttgcgcgaacaacttttgcatatcacttctttgatggaactggaactggatttcagcgaccacgaggagttggagttcgccgaccgtagcgaactcagcacattggcggcccatatcgaaacagtcatatcgcgtctggccaactctttcagtgtaggaaacgcgatcaagaatggcattcctgtagcgatcataggtgagacaaatgccggaaaatcgactctactgaacgtcctgctgaatgaagacaaagcgattgtcagcgacatccacggtacaacccgtgacgtcatcgaagacacgatcaacatcggagggatcactttccgtttcatcgacaccgccggcatccgcgaaacgcacgatgcgatcgaaagtatcggtatcgaacggactttccagaagcttgaccaagcagacattgtcctttggatgatagatgcagccgatgcttctttgcagatcgcccaattatccgaaaagatactacctcgctcggaaggtaaacagctgatcctcgttttcaacaaagccgacctgctcaccgatcgccagtttaaaccgaccgaccttcccgaaaacgtgcaatcgatcttcatctcggctaagaaaagagagcatatcgacaagttgcaggatcttctgatccaagctgctcatattccctctttgtcctcaaacgacgtcatcgtcacaaatatccgtcattacgaagccctaacccacgccctcgaatccatccaccatgtccaagaaggtttatccgccaatctttccggagatttcatctcccaagacttaagagaatgtatcttccacctctcagatatcgtcggagaagtcactacagaccaggtattggggaatatatttgagaggttttgcatcggcaagtaggtagtgattaccaacgattagcatatatcaccaatgattattaaggcgttcattttgagcgcctttctttttagccttataagcgatggttatcgtttatagggctttttcagctcatttttgtaccgtatttgttgctcgcttgtcaaagaccaaaaattcagtggaaaggtagtagagaaactatacgccattttacacggttttacgggaatttacagtaataacggagaaataaagatgaattgaaatgagcagtaacctgaaaattaagcgaatttgcgcttggtgcggtaaagagtttatcgcccaaaaaacaacaacagcatgttgttccaaacaatgcgccaacgctctttataaaaagaagaagcgtgacgaagcaatcaaagctaacaatcaattcgtggagaagaagattgatgaaaagcctattgaaagaatcaaagacaagccatttctcacaattaccgagactgcaatctatctcggagtaacccgacctaccgtttacggatacattaaacgaggtgaattaaaggttactcgattgggcttcaaataccttttgaagaaagaggatattgatgagttattcaataatccaacagagttccatactccaacaaaagagaaagcccctatcaccgacttctacaccacagccgaagtcaaggaaaagtatcatgtaaacgaatcatggatattcttggtagccaagaaaaacaacattccccggactttcaatcgtggcaagacctactggagcaagaagcacgtggatgcttacttcgctaagaaagccccggatcccgacattacagaatggtatagcacacaagaaatacagaaaaaattcggcatgaccttatccgctatctacacttttgtttccaagaacgccatcccaaagaagaaagagggtatcatggtgtactattccaagaagcatgtcgatatagccaaaggtgtggcagcacccgaagaaccgcaatattatacggtagccgaagcaatggagaaattcaatctcacccgtgaccaactctatcattatgcaaagtatcataatatcccaaaggtcaagaaaggcaaatacacgcttatttccaaacctgaattggataaactacttgcagccccaaagattgaataagttatttttcggtgaatgttgccaccattgaatcactctattcctttgtaccaaacaaatgtaaaactctaaatattaaacagtatgacacacacatgtacaaaagtaacagttcgtcagagagcgattcgtaacaatcgcatctccttgtatctggattattatccggcagtccgtaaccctgagaccatgcagatgagccgtcgggaatatctcggcatctacatctatgcccaccccaaaaacgaaatggaacgggagttcaacaatgatatgctgaacaaggcagaagctatccgttgtatcagagtgcaatcgctcatcaatgaagagttcggtttcttggataagaccaagcagaaagccgacttcctcgcctacttcaaaaagatgtgccgaagtaaagaccagaaatggttgtttgtctatcagcatttctacaacttcgtcaaagggcaatgtacctttggcgaggtaaatgtggacttgtgtaagaagttcagagagtacctgttgaacgccaagcaacttaaacacagcaaccgccctatatccctcaattcggcatccggctactactccactttcagaggattgttgaagattgcctatcgggacaaatggcttcgagaaaacatcaatgactaccttgacaagattgaaccacaagatgtgaagaaagaatacctgacactggacgaagtgaagcaacttgccgccactccttgcgacatccccgttctgaaagcagcttctctattcgcttgtatgacaggtttacgcatcagcgatattctcaatcttcaatgggaagattttgccattgctcccgaccaaggctattgcttgcgtatcagaactcagaaaacccaaacggaagcgacactccccatcagttacgaagcctacgaactatgtggtacgcccggcacaggcaaagtattcaagggcttgaaacggagcatgattaactatccgctgaagaactggctcaaaaaggcaggaataacgaagccgataaccttccacggatttcgtcactcctacgcagttatccaaatatccttaggcacagatatttacactgtctcaaagatgctaacccacaagaacgtttccactactcaaatctacgcagatttggtcaatataaagaaacgagagacagccaataagatttcactgaaataaattacagttatgaaacgaggaatcataacaaacaacggacatggcatccatatttctgatggagaagtatggatgaccgtttgggagattgccgacttgttctatacaacagttggatcaatcaattcccatttaaaagcaatattgaaagccaatgtcttaaaaaagtatgacatctgccaatgtataaaattggaaaatgggaatagtgccgatgtgtataatctcaacatgattatagccctatcctatcaaatagacactggacattctacttcattcagaaaatggcttatcagtaaagttgcctccaaacaaaagggcatatctctctttattcctataagcgcagctaacatatataattgctaatacctttgctaaaagtccaacttggttttattctacgttggacttttcttttctattttggcacagttgacctagaataatgctaccttttggtgacaaatgctgccactttcagggaaatgtatttatacatcttgctaatgatatatatttgcacacaaacgattagcatatattattatgaagcagaaaaagatagaacatattactttgaatctgattgttttcgggacaatcgctatcattggtgttttagcccgccagaccgtacttcactatggttgggatgagttcagcagctacctcattttagtggtatgctccattatcatgggagctatctatctcaatctgcaaatggtattcaatcaaattcttccgccaacaatagaaaagtgttttatgagatttgagtgctaccgcaataagcttgtggtagttgaaactccaattgcacacgctgaacttgtcgaaagttctattatttcggaatcctgcatttcagaaccaaaaattgaaatagaaacgacatctgacacaacagaagaagtttctatttcatcgtgttcaaaactcaacgaagaagtggcagagcttccaaaggaagaagccacaccttctaccatcaataatatgcccatcgaagaatccaatcagccaacagaatatgagatattccgtgccaacgctatggctgagaaggaacgagcatcgcaagaaaaattagataaggttctcgcatatacgaaacaaaacttggttctctaccttagcgaaactgaccttaatcgcttatgtggatatattacagaatactacctatccgattctttgcctaaaatggagcagataaaggttgatgctcaattaaagaccatcgatatcatgcactttggctggaatataggtaaggcatttggcaagccacgcctacagactgccacatttataaaaaaggtattcgctcatactctacgtgattcggaaatatccaccattgagcgcaaaatgtctaatactgaatcaccatgcaaaattcagctacaatcgttataacaaataacgactaccctaatatcctctgaaggtgtatagtttgtcactcagcacctcattccctttaataaaatccaaaagatattcttttgtgattacaaattgattgtgttgtttatcctttgttgccaaaatctgctctttatcatcattagtgatctgaaagctgtgaattatacgatttcttttatctactaaatcgctaaatatttgagcaatttcagaaccagctttagttgttattgtatcattaattgcagcttttaattggccagaagttttatcaattaaatcataccaactataatttcttcccccatcttctcgtaatatattctctataataaatgaattgtttgaattgaacacacaaattgcactgcctaataattctcgatattctttagttggaagagattgtcttgtatgattttcatacataatacacttgtatttaaataattaaacaaataaataagcattgtttgtagaacctacttatgtcttgtaaaggtatgtataattctcaaggatgacatcaactaccatcaaaaagttattcatcagttatatttaggagaatgatttcaccattgaaacacctgtttcctttgccatcgaacaattaaaaacgattggcgtatgcaaaaagaaacagtaacatttgataagctgcccgaagcggtaggttatctgaccgaacaggtcatcgagttgaaaaagatggtagcagaactccaaccaccgacatcagacaaacacgtgttggttgaaattgaggatgcttgccgtatcatccgaaaagccaagcctaccatttatacattggtacgcaaagggctgcttcctgcctataagaaaggcaagaaactctatttctacgaagacgaacttctggcatggattgagaatggtcgaagaaaaacttccgagcaaacatacgaagagatgcttgccaatatgcaaggcggcatccgtcataagcccaaatcatccgtgaaactttaataggtgtggctatggatacgtattctattaatccggtatctatcattgatgaagcgattgatttaagcacaagattgaccggtacggcattccccgtcagcatattccctaacaaaatccaacgcatcatccgtgaggtacacgaatgccataactaccctactgactatattgccgcagcaatccttacggcaatagcagttggcataggcaacacgcaccttgcccaaatcaagcaaggatggacggagagccccatcctatatatggcattgattggaagaccgggagctaataaaagccatccgctcagctttgcgatgaagccgtttcttgattatgactaccgacagaatcaggaatttgaaaaggcacttgcaaagtacgatgagctgatgagcatgagtcgcaaggaacgtgcggaaagcggtagtgagcaatttccacaagagcctatccgcaaacgcttcttgatttcggatgtaacgcccgaaggattgagccttattcacgcgcagaacaaacgaggtttatgcttgtgggctgatgaattgtccgcttggttcaagaacttcaaccgctacaacaatggttcagaagaacaattctggttgtcagtgttcagtgccaagacgactatatccgaccgcaagaatgccaagagttccatcttcatcaagcgaccgtatatctcggttatcggcaccatccaaaagaaaattctcagtgaactggctaagggtgaacgttccagcaatgggttcattgaccgtattctgtttgtgatgcccaacctgcaacagaaagcacgttggaatgacaaggaactaccggagaacattgaacaagagtggaatggtattattggcaagctgatacaacaagaatatgccctcaatgagtttggagagatagaaccacagattcttctcttcacagaggatgccaaaagacggctttacgaatggcaacaccatttctctgagttatgcgaccgggaaacaaacgacaccatcgtaagtatctattgcaagctggaaatatacatcatccgtttctgtctgattatccaattagcacgatggacttgcggagagtgtgataagacctgtatcgacctgttgacagtggaacgagcaatcaaactgacggagtatttcaaagagtctgcattgaatgttcaaaatgtcctcaatgaaaatacgctcaacagccaacaacagacaatagtcaatctgcttcctccatcctttacaaccgcccaagctatacagatagctgagcaaaatgggatgaaggagcgcacgtttcaacgctttctcaatgacaacatcgggacattgtttcgcaaagagaaacatggagaatattcaaagattaacccgtgacatttttgtcggtattgacactatccaagcgaaaacgacaataacgacaaaagtgacacacccaaaaagagacatacaatgagtacacatagattcatattagaaccctacaaaggtgtcagcactcggcatacttgcccgaactgtcaccgccaaagatgcttttccaaatacattgatacagagaagcaaatcaagtttccagaatacgtggggcgttgtgaccatgagcagaaatgcggttatcacttcacgcctcgtgattactttgaacagaatccatctgagaaagaaaagtttgctgagaatagcttcggaagttatacacctattaaagaagtaaaaccgatagccatctcctacatggatttggatatagtcaaccaatcattacgaggctattctgcgaacaagttatttcagtttctatcggcccaattcggagagacggaaacattgaatcttatgaagagatacaaggttggtacatccaagtattgggatggtgcaaccgtattctggcaaacggacaatcagagtaaagtcagaactggtaagataatgctttacaattccgaaacgggtaagcgaataaaagaaccatacaatcatgttacgtgggtgcactccgtattacacaaaggtgattacaatttgaagcagtgcttcttcggtgagcatctgctttccgaagacaaaagccgtccagttgcgctggtcgaaagcgagaaaacggcaattattgcatcttactatctgccgcaattcctatggatagcatcaggtggaaagaacggttgcttcaatgtcaacagcctatccgttctggcaggaagaagcgttgtattattccctgatttaggtgcaaccgactattggcagagcaaaatcagcctgatgaaaagctgcggaattgaagtacaaatgttcgattatttggaagtcaacgcaaccgaagacgaacgcaaggaggggtacgacatagctgattatctactcaaagtgaagcctgacgaagccatccttcaacaaatgataaggaagaatcccgtcttgaaaacactgatagatacattcgatttaaagctcatcagcgtacaacaaggcactccacaaccgaaggttttaccacccaagaagcgaggattcagactttgaactcagggagaagaatcgagacttttttactgtagcaagttaatgtcggtgtattacattccccgaccacttgctcctcaaaaagtctgaggaggcggctcccgatggtcacgcattattcactaaaaacagattcaaatggaaaagaaatatacagtaacactccgtctgtcatatcagcaatacgcatggcttggtgcgctttgcagacagagcaagcagacccaaagcgaagtgatccgttcgctcatcgaaaacggttcggtacgtgaacgaatcacgcaagagcatattcacattatccgtcaactgattggcgaaagtactaatcttaaccagttggcaagacaggcaaacacctacggtttcttcgccgtagctgacagatgcaaggaaatggctcagcacattaacctacttataaaacggttgaaagatgataggtaaacagactaaagggacatcgttcggtggctgtgtcagctatgttctcaaagaggagaaatccaaattgctggaagcagttggagtagaaggtacacccgaacagattgcggagcaatttgagttacaatcgctactcaatgataaggtaaagaatattgtcggacatacttcgctcaacttctcaccggaagatagcgaacgcttgaaacatgatgatgaactgatgttgcaaattgcccacgactacatgaaactgatgggaatcgaaaacacgcagtacattattgcccggcacatcgaccgtgaacatccgcattgccacatcgtctttaatcgagtggacaatgacggcaaaacgattagcgacaagaatgactttcgcaggaatgagaaagtttgcaaaatgttgaccgccaaatatcgcttgcattttgccaatggtaaagaccatatcaaggaggaacgattgcgcccttatgaccgagcaaagcatgagatatacaaagcgttgaaagaggaactgtcccaagtacaaaattgggctgacttaaaggatgcacttgccgaccgagacattgatatgaaattcaaggtcagtcgaactacacgggaaatacagggtgtaaaatttgagtacaacggtttttctttctccggctctaagattaaccgagagttcagctacttgaatatcgacaaccgactggaagaaaatgcttgtgcatccttgtttgaatcacccaaacaggaatccagacataaggaagataatgtacaacaaagcgtttcccattccgatgatggctcaagcatcagtctcgacttgctaaacggcaactcgtcgtacgatgccactgccgcagaagaagccgagttcaatcggctgatgaaaaagaaaaaggctaagcgcaagcgaggctttcatttataatccactttttattaacactttaaattcaattatttatggaagatttgattcttgatttcaatctctacttgtgtgagaagttcggctacagaaacagttgtagcgtgatgcaaaatgccaatggcttttgtgtgaacatcagtgaacgtgatctggactgctacatccgcttttgggagtatagttgtggaagaggcaatttccccgactggtctatcatcattgtgcgcagtaacttcaagaagaaccaagaagaaagcctgaaagatttggctcgcttcttcaaggagtacatgccgcgctacggttacaaatacctctgtaccgaagatgatgactacaagtattatcagacacttggcttgaagtgtataatggacggtttttgtcccaattatgcactagcactgaaagatttgaatgtctgagacatggtttagagttaaggaggggatttttcctctccttttctcttttcgatgtaccataatgagcagattactctattatggatgttgataataaaggttttaaccccattctcagaatgtgtgcaatgattgagagcgaagaaattactgtatcaaattccttcgctctacatattacatcattttcccaacgacttaaagactttcgctatacaacgctttttctgttccatatttggatgaacatataagtccaatgtagttgaaatgttggaatgccctaacaatacactaacggttttgtagtcacagcctgcttctatacaacgagtggcaaaactatggcggagtccatgatatttcaatttgggaatacctaacttcgccattaatttaccgtagtaattacgataggtacgaggctcggttggatattcatcattagtcaagacatagaaatcttcattgacgaccttcttcagtggttttaccattgcaagaagctcctttgtcataggaatttcccgacatgagttttgtgtcttgggtgtgttgataactagttcggtatgtttctccgtcccatcaataatgtaaatccgttcaattgtacgattaacggttatcgtaccctcggaaacattgatatcgctccacttcaatgcgcagacttcccctatgcgaagccctgtacaaagactgatgtagataccaagtccggcaaaggagaaatggctttgaatatgattgagtattttcttgtgattggcaactgacagtacttccaaatctttggttgtcgaagaagacggatatttgatgtcccactcttgataatccatccattcgtttttcacaccgaatttcataaccattttcagaactatcaatatgtctttcacggatttcacactcagcccattctcaattttccataaaacaaagtcttgcacagcctgttcgtggagtgtatcgctttctccaaagtttggaagaatatgattctccaagatgagcacataagcagccattgtagactgcttcacataaggttgcttgtactctttccatgcaaccgagatttctctaattgttttttgtcccataatcgtatattaatatgttgtgcatataattagagaataataaatcccagatgttccccatttgagatttccggagtttagtggggagtgggattctgaaagactagagaatctcacagtatctataggagatggcttgcactccactcctgtttattgcgaacaaggcgactactgttttattaacggtaataatattattgatgggaaagtatctataaacgaaaaaacattaagagtaacaaaggaagaagcgtataagtataatgcagctctgctaaaagtagacaccatacttatgtctattaatggaacaataggtaatgtagctctatataatggagaaaacataatgctaggcaaaagtgcttgctatattaatccatcatcacgtattgtcagagaatatttatttcatattcttagttctcctagaatacaagcatactttcaaggggaagttacagggacaaccattaaaaacctttccttaagaactattcggggctctaagatcttacttccaagcaatgaagagcaaaagaaaatcgcccgattattttcgctagtcgacgagcgcatcgccacccaaaacaaaatcattgagaaactggaatccttaatcaagggaattgcacagaatgtagctcgcaacaataaacccaatattcgcttatcggaatgcttggaatatagttcttcaacgctacaagagagcgatgtttgtgaaaacggcacataccctgtgtatggtgcaaatggcatcgttggctatatcgataattataacacagagaaagaagccgtctatattattaaagatggttctggtgttggaacagtttcttatgttactggcaaatgctctgcaacagggacattgaataccttacaagcaaaagaaggttattcacttcaatacctttactatatgctgaaagtattcaactttgaaccttataaaacaggcatggctatacctcacatatatttcaaggattatggtaaagccaaaatattttgcccatcatatacagaacaactcaaatatgtggagttactgtctgcaatagataacaaactatctgcagaacagagtattttaaccgaccttagtttgcagaagcaatacttgctcagtcagatgttcatataaacatctggcgaagcagatgctgcttttgagaattatataagtcaagcagactcttctctgtttctgttttactttctatatggctcaatatggaatatattcgtttttgattttccaaagagggcagtttgatatttgccttttcaaagtctgccttacaaaggttgaacctcgtacttccttgtgcataaggatagataaatttgcgaaaaggagttaaagatacatagtaagatagatatgggggaaaagctatcttcgtatttctgatatgaataccaaaacaaaagctattcagatatacattctcattgccaagatatactgaacctataccaacttcctctggagtttctgatgatagcgtgaataatacatcaccatattctacaacattctgtttctcatcatctttgattgctacatattgaaaatctttctcattgatgatattgttagaatacacattcaagtaagttatgaatggttttcctgaaccaaagtcttgcgctgatttgccagacaaaccagaatatgaaaagccgagacttgaaaaagaagtcaatacatcattgccgtattgggcatataaagaatcatttagtcccttgattaaggattgtgcagtttataggtctgcgattagcaagaagttattatgcaacgacaagtggactacttataaaatccaagacatagcagaaataggaagagggcgtgtcattagttcagtagaaattgaaaaacaaagacatcctctatatcctgtttattcttcccaaacttccaatgatggaattatgggatatttggataattatatgtttgatggcgaatatattacttggactactgatggtgcaaatgcagggacagtcttttacagaaatggtaagtttaattgtaccaatgtttgtggcacattaaagatacatctccaatttgattgccactttgtatcgcttgttctccaacaagctactcaaaaatatgtttcttctaatttagcgaatcctaaattgatgaacaacacaatggcttcgataaaaataagaatgccggatatggaaacgcaaaaacgattatccaaggtattccaaacattggatagtcgtctactggtacatcagtgtacttatgaaatgtatctgagagaaaaacagtatttacttaaccaaatgttcatataaacatctggctaagtaagtgtcgtttctgtgcccaaaatagtctcaatatactttgctcaaaatcaatcttggagttcagagtggatggtattttggctattccttgttgtttctcttttattggtatcggacaaagtatattgtttatatcttttaaataggcagtcttcatagtgccctctgtaacaatgcgactaactgcttttttgaaataagttgacgacataaaataatataagaattcaacatctatattggactttggtacaatacccaatatcccttgttttgtacaaacaggatatgtcgttattgtaatttccccaatggtagcaccatttgaaaatagaatggaacgtgtaggcacaagccaagctgatgatttttgcaatccaagttctgtaataaagtctttattttcagtcaaatatttctgttttaaatcatcaatcttgacaaatggtattttaccattatcgtagaaactggcgtttgaagttgttggagttccaccctcaccagcagtttcatacaaagaactgaatttagcaaaatcagtatcaagagaatctatcgcataatcaataatcgcagactttagtttcttcaaatcctcaatgattttgttttgggttgcgatgcgctcatctattaaagataacaaattggctatcttttcctgttccttgactgatggaaaactcaatgagattttagataatccttcctgtcctatattgaaatgttgtgctcctgctcccattctgcaagtttttttacgtgctaatggagtcgcaagtaaatacttaaagaacaaaggaacataattaccgattttacgaccacgaatgacaaaacctccataaacggcagtacgactatccatatacacattagctcgtccaacatcttctaatgtttcggaactacgttgaaataataaatctccattttttacaccgaagcagtctatttctttgtctgtagcttcaaccttacctcgaatactattataggtaataactccttctgcaagaatatccataacggaaataaatggtaatccctgcccaatacgttttgcatctgggttaagtccgttcttaaattccaagtattcggaaagtgtgtgttcttcccactctccactgaactctgggaatctcaaagggggaacattgaggacttttttatctttattatctattgccatagttgtcattattttgtaggattcaagtcaaatgggagtaaaggagtttcatcattaccctcattaaaacggtcaaaatccgatatatatgatttatcttgaatcagcttatatttttcgtattcgctataagccttatctcttgcttcctcttgtgtcacttttccagccgtatcgcacggctcgtaatccatcgttgcaagatattgttgaaggaacttcttccaatcaaccatagttgaaacgatatgacgtgtagcacgtgattctgccatatcaagaaaggcagttgtgataagattcaactgggacagttcagaatctgacaagtaattttttgcgacgatggtatcagacttttgcactcttccgtcaggagcttttttccacgtggtaagtcccatgtaaggtcgctcggaatcagctcgttgataaataatttccgcagccgtatgatgagtaacggcaaggtgcatcatattctgtaccatcttaaagaacaactttgtgtcttctgatttcggatcgtaatccgcactacattctgcataaatgtcggttatcttttggtaatatctacgctctgaggtgcgtatctcacgaatacgctcaagcaaatcgtcaaaatagtcctttccgaaatgtttgccctgtttcagcctctcatcatcaagggcatatcctttaatgataaactctttcaatacagaagtcgcccaaatgcggaattgagtagcttgatagctatttaccctataccccactgccacaatagcatcgagattataaaatagcggcatacgttctacttcccgttctccttcagtttgaactatcccaatttttcggatagttgcctctttagaaagttctccggtttcgtaaatttgtccgagatgataattgatagttctaacatcaaccccaaacaagtccgccattcttttttgtgacatccagaatgtttcgctgttaaaaatgacttctacccgtgcctctccttgtgctgttttatacaacaatatattagaacttagagaattatgcataagttctgccattgaaacagattgcgagaaaaagcctcgcgcctgttggacgagcacctttttactatcagcattttctgcaataatcatacatgccatacgagagagacggaatatatttaccttgcggaatgaaccgtttcctattttgaccatatcaaccgcttggttgatatgctcgtccacattcattcctttttctccggctactttaatggctttatctatgactcgttgaaatttccaataagcagaataacccatcgcaccacaaaggtcacgagaactccagtattcattcccgttttcatccttgcggcatatattctcaaatgaaggtgtcatctgaggtatgttgtcattttcacccattgctattacttttctgaactattctaccagtcccaattctttcagatacacttcaatctctttgtcgagttcagcacgtttggcttccaactcctttatctctgccattacagcctttatgtcgataggttcttcctcttcaaaggtatcaacgtaacggggaatattcagattgtaatcattctcggctatttcttgaagagaggcaaggtgactatacttttctatttccttgcggtcacgataagtctcgacaatcttttggatatgctgctcgcggagcttgttctgagtctttaccttttcaaactccttgcttgcatcaataaacagaatattgtcatcttctttacggcacttcttaaaaacaagaatacaagtcggaatacttgtgccatagaaaatatttgcaggtaatcctataatagcatccacatagtttttcttttctataaggaaacgccggataacgccctccgcatttcctcggaatagtacaccatgcggagcaacacaagccattgtaccgccctcgttcaagtgataaatcatgtgcaggataaaagcataatcggcagtcttacgtggtgcaagccttcctgctttgctgaaacgatcatcagtattgaatttgtcggcagcactccattctgcagagaacggaggatttgcaactacagcatcaaactgagtatcaccaaacgcatcccattcaagtgtatcaccattctcaatcttgaagttgctgaatctgatgccatgaagcaacatattcattcgggcaaggttataagttgtaggattcttttcctgtccataaatatcaactgcatttccgatattggcagcacgaagaagcaacgagccactaccgcaagtagggtcatatacattgcgcaaacgctggtgtccgatggaaacaatttctgctaagatacggctgacctcctgcggagtatagaactctccagcctttttcccggctcctgcggcaaattgcgaaatcatatattcgtaagcatcacccaaaatatcaatctcctgcgatgcctctactccgaagtctatatcatctaatgcaagaagaacgttactaacgagcgtgtttttatcgtcagctgtcttgcccaatttaggcgatgccaagtctatatccgaaaacaatccgccaaaatcctcttcactatcctgtcccaacgtactgtcttcaatacgcttcaatgaacgttcgagcataggcaagatattttctttacgcttgatagcctcaattactgacgaaaacaaaaattttggttctatgaaataaccaatattctccaagcattgatttttcgcttcttcttgtaattcaaccgcatctgtatcatccatttcccacaattccttaaaggttatttcatcatccaccaaggcattgttggcatacttctctattttctccgacaagtacttatagaagatgaaacctaatgtaaaatacataaagtcgcttgccgacatattaccacgcaaacgatttgcaacctcccaaagttggtcacggagtttctgctgtaattcttcgctcatattattttagtatttcttttactacttgtttgatttttacacacatatcacaaagccatgcacatccattatcccaattatctttatcattcatatcccccataggatgaagaataaggaaacgacttgcctttttattttcatctagtcgccattctatttcattaggatttataatccctaatattttagataccaattcttcatttgacttaaatcgggtaatgatatccttgtcctcattaacatacaatcctgctgacaaacaattatttttagtatttaatgtcatacaaagatgatatgctgatgatcctaaacctaggtcataccaatgctgagcttgtggtttacgcagcttaaattcccttataaaggcagagtgttttggagcttcgttgttgaacttttcccaaaatgctaatttcaagttttctgtttctgaaagtgctgctgtctttttcattgcctttgcccaagtattaggtcgttctacaatattgaacttaggtgcaggttctgaatcattgattttccacaattctatttctattaagaaaaactcgaacttgtcatccgtatgctgatttaaccattctattgcttgtttatgctcgtcacgtgcttttctgacaatccaaattattacttcagcttctttacctgaagcatacgttatgattttgccaagatggtcatgatttgtttcctctagctgattctcaatgattatccgtcgtcccgtcccctcctctgtcgcaaataaatcaacactgaaatcgcctacattggattcctgttcttcaacgactatatcaatacctacagcctcgctgagaatttccaaattctcttcttttgcaagccaaggagtaaaatctttggcttcatgtttccagacagaacgaaggtctgttatctgctccagtttacctaatttcatgattgaataacttttaattattcccaattaaacgtttttataatactacgcaatctttccataattctcgtcaaagccttgcgagttttgataagaccgagatgcttttctttcaatgccttttgtataatctcaggctgttctttttgcaaatagtcatactcttttatgtaaagattaagcacttcggcagaaatttgttcatcattagccaaatcacttacagccttattgcgttctgacacaatatattggttcaaacgttcctctaattcatttgttccatctgctctattgcgcccattcatgaagttttccttgtcttcatctacattcttttgaataaagccgtcgatgagttttgctttgcctcgcattccagcatccttaatcattgtatcaaggatatgcttgcgcttttctgaataatcatcgctatatgggtcaagttccgcaatgagttcaagaatatacgccacattgataatgtcactatgcagaagttcaagacagaaatcaatgtcttccagcccttgattattcccgtatggggcaggatcttccgcaacagttgacggtgtagcaggtggatcaataaacccaactgtaatatcaaggtatttactcttataatcgttaaactgctgttcagtcataccgaggtcttcagcatcctcgctgtaatcttcgtatatctgaacttctgcatgtttacgaataatgtcacggaacgcaagtacaaaattcttcttgtcattttcactttgcagaaggtctatactacttggcgttggatatttttgcagaaaatctgttgccaaactcttgtactcctgctttactttttcaaacggaggacgtactatatcttcaggattgtcggaattgctaaacagttttatagacgtatcaacattgtttttcaggtcacggaagcatacgattttaccgaatcgtttcttctcgttcaacactcggttggtacgactgaacgcttgcaacaacccgtgatattccatgttcttatccacataaagcgtgttcagctttttactgtcaaagcctgtaaggaacattcccacgacaagacaaaggtcaagcggtttcatttccgctttcttctttttcatgcgcaggttgatatcatcataataagcacggaaattctctgtggtaaaagatgtaccaaagttttcattataatcatccataatggattgcagttcatctgcttcgcccacattttcgctgacatattttcccgtgcccataccggtctgttcatcatcttgactattattggctgcgtatgtaaatactgcacctatacggattttaggattcaatgatttgaaaatcttgtaatagcggataagcataggaacagactgcacagcaaacaatgcatcaaactctccatcaaatgtagatttattgaaattgttaagaataaatcttgcaatctcttccatacgagcttggttatcgttatctacaatctcgttaccatgataatactccacgagaaagccaagcacattttcatcggcaatagcatctttgatgagatatttatgaagacaattgccgaaaatttcttttgtcgtatgtccatccactgcattttcggtaaagataggtgttcccgtaaaaccaaaaatctgggcattatcaaagaacttcataatctttttatggctatccccaaaatgactacggtgacactcatcaaaaatcatcacgatgcgtgaatgacggatagcgtcaatcttgttgctataccacgtcttactaactgccgcattaagtttttgaatggtggttatgatgattttggaattgctttgaagtcgcttcacgagttcatccgtattgtcggtactatccactgcacccggctcaaaagcctcgtattccgattgcgtctgagtatcgagatcatgacggtcaacaacaaacatcaccttatccacatcatccaattctgatacaagttgtgcagccttgaatgaggtcaatgtttttccggcacctgttgtatgccagatataaccattatcattggagttttgtacacgatccaaaatcttctctaccgcatagaattggtaaggacgaagtaccatcaagcacttgtcgccctcatgcagcacaatatactttcctatgattttgccaagcgtacatttttccaagaagaatacggcaaacttatccaattcattgaacggatgattggcggcatctgtccagttgaatgtgaacttatacccactatttggattattggcaaaatagcgagtgttaacgccattggatataacaaacaactggatataatcaaacaatccgtgaaacgaagtcttgtgataacgctgtatttggttgtatgcctgtttaagttccacgccacgacgtttcaattcaatctgcacaagtggcaaaccattgattaggatcgtcacatcataacggcattttttacgtccttccactgtgatttggttggaaacctgaaattcattctgacaccactgttgcctatttagaaattccacccatatacgctgtccatcagccgtatcaagcggatataaatcacggagtttctttgccttttcaaagcgagtaccaccttcaaggtatatgagaatcttctcaaactcttctgtcgtaaactcattgcgtccatattcctccagccgtttgcggttatgaacctccaactgccgcttgaaattggcatacaaattatcctcttctacaatttggacatattcatagtccatttgttgaagagtggttatcagtccggcttccaatgccgcttcactttgtgttgacatatccttgccctattatgagtagttactacttatgctattagtattctgacatccaataccttttcgattttacatagattgcaaatgcatctaaaaccatcaaatcgattcaggttctattgcagtctttcttttttatcggttattaaatccttcaaatcaacttgtagaatctcggcaatccgctggagcgtttccaaattaggttgaatcctattgcaagcataagcattgaccatgctaaaactcttatccaattgtttggctaaccacgtttgagaaatgcctttttccgaaaggactgcctttattctattcagtttcattctttaatacgattttatagtgcaaatatagcgaattatattcgataattgtgattatttttgtacttttgcacctacaaggtaaataacttggattcacgcatatgacagccaaagatagaagtagattacatcgaggttataaacgcttcttacgtcagctaaaaacaaagagacaaaaaagaagaaaggctcaaatcctatgcgaagagaatgcccgctataataggaaaaatggcgtgattctctccgtagatcaattgttgtctaacacactttctccaagtgtttcgtatctacttaactgcataagcagtcctcttaattacgaattgataaataaagagaataataacactaattgttatgttgaaataccaagacttttttctctaattgaaaatccccaagaaagttattccgcaatcagaaaactgatagttttgtctttattttcaaactatccagaaatattcattgactataccaaatgtgatgaattcactcttgaggctcaagttttgttagacttaatacttaaggatatatttaggttttacaatagatgtcgaaagaaaaagcgctttaaaaagtacgcaaaaaggattacagacagatctactaggggaagttccataagaaccatgttattttccgtaggttctttagcaattcatgcaaaaaaacaaatagagttttctcatgttgttccgtataatctttgcattcatcgttctgaagttgatactattcgacaagcagaaatgaaggacatagacacaactactttatctgactatgttgatacttgtttgtcaaaaatgggtcgtaatttagaagatgagcaaatagatgatttatgtaccgttattggagaaattctcattaatgcagaagaacattcttctacgaaatgtcgctattcgataggatattttgaagaacaagaaatagatggagaaaaagttggagtattccaactagtcataatgaatttaggaatgtcgatttacgagaaattcaaagatgaaaattgcccaaatcctattatatctgataagatgaaggagttgtcaaaacaatacacacacaaaggattcctaaaaaagaaagaatttgaagaagaaactttatggacactatattctctacaagatggagttacttcagtatccccagaaaaatataaaaatagaggaaatggctctttgcgctttatcgaaagtttttacaacttaaaaggttgcaacgcatcaaaattatcaaagatgacgttacaatcgggaaaagcaaatattgtatttgacggtaaatatccagtaacagaatctatggtaaaaggagaaaaatatagagtccttacatttaacagctctggaaatattgaagacaaacctgataataaatacgttaaatgtagcgagttctttttccctggcacatttattcacgcatatatatatttataattatgaaacaaagtaaagataatattatcaatttagaagactttagggtcaaacgtggcaatattgtttctaaggttttcacaggtagagatcgaggagtctatgtgagagaaaactcacatattgatgatattgattctaaatatgaaacaatagagatcattattcccgaaaatatcaaatctatcaacccctcattttttgaggagttattcagaaatgttgtcacaaaacatggtagggatgagtttatgaacaaatacaaattccgttctttgggaacttataaatacgaaaggacgttatcagaagccattcaacgaatattaagaaataacactgcaattggataattatggatactttacaattggttattgattctatttctaaaatagcaattataccacaaagcattagtcaaggaatttcaccacaacctattgcttgtcttgatgcgttacataaattgggagttgtattaatcgctttatttaatcttatattttctatttatctatacaaaacaaataaaataaaccagaaaataaaagacatgaaagttaatagacaaaatctattaaacatattgattctcaaccacaaattaaatgatttctataagatattcgcctgtattcatacagaatgtcaaatccttttaaatacagaaataggtgaggaaaaacgaaaagaacaagcaaatggaaaactggaagagctatttattcaacttaatttagaatttattactactctacgagctgttgacataaaattaagtgatgagattttatctatttctgatactctacaaagtaaattatccgaaaatatttttgataatggcgtaaatttgcatgttagagacaaatatgatgaattgattcaaacccccatttcgaatgcagaaatagaaatactaaaaaaactatacgagttttcgtaattcaatactaagtgatatgttaagaatcaaattatcacaaatgacacgaaagcgtatttaattagcagagatcaaacatggatatatttagtgaatacatgaatgacgaaaacatcgaaaaaatgcgaaagagctaagctctggcgagcatctatcgggttacaagcagttgacaatctgcgtgtatccagctttctcattgagactgcacgtaaacatatagaagggcttatttctatggatgaggttcataaaatgatagatgagcattatgcacaaaaacgcaagcaatcaaaaccagattgaatactcacctatcagtattatcgcctttcagttattcgaaattttcgaataactgtccctccgatgtaccataaaagctacaaggaagaatattctaagcattgtgtattttaccgttttatagtctttgttaaagcctcgcaagccgtcctttcaataattcgccatacttttcttttaattcagcacttaggaaagagttttgaatgatagtctcaaacttgggcaatagtttgatatatttatttatcagtcgttctacaatcacattctctatacctagcatggaagctgatcgaataaaatcctctctttgaagctttttcttccgaccattcaaagtcaatgccaactcttcgtcatccttgggattgatgatagccgcatttagcaaatcataagcaggggttaaacgtatcttatccgccacctcatacaaagagaagtttttcaagtgcatgtcgttattccctgtcaaccaagagaaaagcaccaactcaaagaaattggtaacatccatctttggtaaagacgagtatttcaaaacgaccttgccgacacgttcataactgctcttgtatttgtgctctgtttgcctttccgtcagttggcacatatcttccatcgcaatcttctctccggtagaagtcctgtctatccggcgggtaagatagcatagcgtatcatctgccatccgcatcagcgtatgaggaacgacctcaatacgtgccacctcagcaaggtgcatggttaaatcctcaacctcaggcatcatttcatattgcgaggtctgtggtttacaaatataaccgccccatagcccgacaatagtcaatcttttacagccctcatgttccttcaaatgcaaggataatttcggctgaacaccggtcaaagaggtttgttcttgaatgatttgcagagcaagctgatcaagttgttctgtcgtataatcaagaacaggcaatgtcgttgttccgaaaaacttttttatgcaagccgtgtgcatgtccttttccccctttaagagcggacgataacaatataagcaattacacatggcttccctccttttcttccaatggaataacgcttactgctccgatacaatccttgcagcatgtcagcaacaacgacatccggtcaagaatactgatgtctgtattcctcaacgcaacatccaacaaccatccttcaggaatcaaaccatcgaaaaatggaaatagtacatgacttgtatatgcttcctcctgtaaaggcaatgtcatgctaaccgcctttgccgtttccgaagagagatattccggcaaatagcggaattcatacccggcatcattttctgtcagaatacctgccaattggtctttgtaaaatatatgggcttgtctcattgattatcagttttagaagtggcaaccatttcataattgaaaaaggcaaggagctggttcactttatcgagacgtagcgtttccttgccctgttcaaggtctcgcacaaagcgcaatcctactcccgacttcaacgagagttcttcttgcgtcagattatattgctttcgcaacattttgaccgtagtagaaagattattcatagcatcatactttataccttttcgggtacaaagttagcataaatattcgatattatatcagtatgggtataatttattgtttcaccactgcaattatatcagacagggtataattcaatgaggattgagatgttaatactaaggctaaaaacaagtacaacgcaatggttctacacttttccaagcgaataattcagatttgctgcactttttccagcgaataacgcccaaatgaaaacactttttcagacgaataaatcatgtattaccacatttattcaagccaatcatatattttcgtgcaaaatttcagtgcaaaccacagaaattccaagaaaaccactacctttgcattcaacaagcgttctgtaacatacctgcggaaatgccctatcactcaatacattgtatctgatagcggacattccacaaaaggactgaaaagaggcggtacaacacgtatatgcaataccatgaaatacagcggtttgcatttgtccccacattctgtgtatttgtcaaaacagaggttgtaccgattaaaatgaatggtcgctgataatcaatgatgtaaatatgctgcatcgaactttctgttggcattattagcatatatggaatcggcagccacacatcttagggacattcaataaatattggaatattattatgataaaagcattgccaaaaactatggaggtgcattaaagtctccttgtttccatgcttgactcaagatcacaaaaaactagccttatcgatctaatgtttatacggccgattttaatgtgatcctgcgtcaagcgcaagatatggaatattaatttgtagcttcctcaatcgagaattgagaaattttagaatacccccaagtcgctatctttgtcgaatctgcattgaatgtcaaaggatacttcacacgataacttacaatcttcttccctgctgctgattcttttcctttcaacatagaatataatgtacctccttcaacagcgatcgggtccatagcattgctaatggttggtgctttcccttcttcccgcttttgagcacgtaagcacaacgtataaacacggtccgttccatcaacagtttcaggttcttgattagaatccatcgacattatatatgtgttcttctgatccgtcaacacagatgtaaaagtaggaataacaacgattctcttataattattagaaaataacaatgcactttcggaaccagacaaaagcaattcattatctaatgccattgagtccaatggagaataactcaaatcatattttgctaatggagaagaagcagctcctgtcgccacataaaaaccatttgtactggcattcgcattatccgccgaatcaaaatcgaccgtaaaattagccaacacacaatctccagccctataagtcggatcatttgcaattgtagcgacatacaacggataatagcccaatggataaatcagagttctcatcgtagaagaataatcgactatagcataacttgaaagctgctgtgtattaccgccgccgtccaaacaagaggttaacgaaaacatacccgcagcgattgctgctaaccctaaaactttaagtttcttcatttttactgttctttaattttatattgtttattatttattagttcttactcaaaaaccgaaacggaaacccgcctgcaaattcacattaaacggtttctcggaacggatcgtctcaatatcgcttccgttatcgaaataataaccggctcccacctccgcataaacacttaagaaacggagcaacggatagctggcaccggcccgggcattcacagaccacatccattctttcatacggatatgcttcttctcgtgacggatttcattgttttccacaaatattttggcattcaacttaccagcaacattaatctcggtcatggcccccgccgctgcataaaattgaatacgcttccattctgctattttataggacaaagaaagaggaattccaataaaatgtaacttctgtttcgtctcaccatgatatatagctccggtctcccattcggaagaaaggaatgtataatttaaaccagactggagggaaaaacggtcatttagagaataactgacacctaatccgatcgaaactggtgtcttatgacgaatatttgttttcggagattggctattgaaatacggggaattcaattgcaacagttcctgatccgtcatcaacgtattcttcaaagcataggcatttaatgaattagatgttccagcactcacgctaccacctcccattccgaaactccatcttttcgcccgtactttcttttcttctgttttcacaggcgctgcatccgcaaataaaaagtgtgttccggtcagcgttgccgtctcggtcaccgctatcgcttcggacgcttcggatattttagaagaaatcactacaacagtatcacaatcttcttctggcgaaaggacaacttcgtctgccgttatatccgaccgggacgtagttacggccgtaacttgcgcaacagcacgttttgccatccggtcaaccggcttggaagcgacgactgctggtgtcaccgattcggatcgttcagtcagcctgttttcaacagcctcggtttctttccgtatcgtttcggctataggcagatgttcccggtcgcggttaaaaacatagactcctcctgttacaaccaataaagaaataacagcagcagccccccaatagcgtaaagtccgccggaaagggacagattttttaaccggcaaacggtcagctattgcctcccaatcacccgccatcgtatccacttcaaagtcttgcaacttcgaacggaacaaatcgtcaaatatatctctttccttatccttcatttctttattactcaatacaaatcatgaatcctgcgttgcaataattgtttggcacgcgtgaactgcgaccgagatgtactctccgttatattcatcatctcgctaatctccttatgtgaataaccttctattgcaaacagattaaacactgtacgaaaaccagcaggaagctcctgcacaagtttcatcaactcgactgccgacatatcggatatagcagaactatctggatgaaccaactccaccgtattatccagatcgactgcttcacgcaaaacatccgatttgcgcaaatactccaacgcacaattgacaaagatctttcgcatccacccctcaaacgacccaagtcccgaataagaatccatactggtgaagactttcacaaaaccatcctgtagcaaatcacgggcagtttccctgtcgctaacataacgcagacaaactcccatcattttacgggaatacgtttcgtatagctccttctgagccagcctttccccattcctacaaccctctatcagttgtttctccgtcatttagtgtgtgccttcatgccctttccaggaccatacatttattatgatgttcaaattatccgaaacgctgcattccggataaattatttttcttgaaaacgcacaaagatactgtattctggcaaataatcggaatcggtatcaatttttagacacagatttcacaaattatgtaacccatacctaaatatgctataaagcgatatgtcaaaatatacttgccccttacttttttagcaagggcaaccagctccattgtccaccgaagtattccaaggtttcctcccaaaccgttaatattatttaggatatttagaaagataataataggtttctttcgatagcacgctttctatatgatagcgagtggaagatgaaacggaaaatatatatccccgctccgaagtcgtatcgacaggcagatagatggaggtatcccggattcctgtcatcaagatatttcgggcggatgtcggattgatcgaatccgtcagcgaataatagacggtataagtcaacacgtccttttccgaatccggtttctgccaggagagcttcaactcatccccttccttttccacccgtatttcttccggggctgcaggaaccgtatcgtccaaccaggacaaaggaggaagttgtgccggatatttataatatttatccttcaactcatcgtatatccctttcgtattgtcaaggatattcgcacaacggaagaatgtacagccggcccctccgtaataacggctgtagtcgatctgatccgttatatcgttgacggtccagtctgcctcttctttcaacatccggtacgcgcccaatccgggaactacaaggcgtccgttgcagttatctacccaattgtcaacaaacgggaaaaagttatcatgcaggtaatacatcatcgggacgatcatatcctgcttcccgttctgcatccacattttcggatcctggaagacactttcataagccgtccatccggcgttcggaacacgttcgatgcggttatacttgccgagcggcgaactgctgacctgtatccaaggctttaccgatttcacccagtcataaatgcggtaaaccatcttattgatattctcccggcgccattctgccagcgggcgtttcttaccatatttattatacaagtttttatccgggaaagattttgcctgttccggatagcggatataatcgaaatggatgccgtcgatatcgtatccgttcaccaactcctttactaaagacaacacatagtcggaagttccaggaacgccggggtctaaataccattcgccgttatgacgcttgcagagtttcggctggcgcctgacaaccgagagctttccctgttctttcacactcttgtccgtgcctagcaggaaagttacaaaccaagcatggcattccatcccccgtttgtggcattcgtcgaccacgaaagccagcggatcatatcccggcatcattccatattttccagagaaagttttgcttgccggttcaatagccgaacgccagatgacatcgccacgcatacggacctgcaaaaaaacagtattgaaattcgcatcctgcaaacggtccagaatgtcacagacatcgcgttgttgcgcctttcgccccgtctccgtcgttgccggattatgtggccagtccagaccatagacagttgtcagccacactccccgaatctcacgcttgggaggttcgactgcattcgaaaccaatgtcaggaacaagagcaataacgacaagcaatactttctcatttcacacatttactcagcggtacaaatgtactgctttttgcgcttcttcgggatagtcggtagtcagaaagtccacacgcttctcgatcatctcttccatcacctgaggatcattgaccgtccagacattgattttcagtttcagatcttttgcttcaacaaaccattccggatgtttctgcatcaccttataattatagtcgagaccggcaaaaccgagttctttcaactgtttcggagacaagtcgccgttcaggtagtagactggagtcttcggggacagacggtgaagctcctttgcggcttccaaactgaaagcgatatattcggtgcgtttcgtcaatttcttaccattcaccatgtcgactacaatctttgctgcttcccgatcccgcaggggagtcgcatgggatttcaattcgaaaatcagcttggtctttttcagcttcttcgccctgtccaaatactgttccaacgtcggaagcgtttcgccgttcgaaagtttcaggtctttcagctccgcataggaagccgtctggatatcctttccttctattttacggtcatggtacacaaccgggacattatcaactgtcaggtgtacgtcaaactcggaaccgtatactttgatctcattcgcccgctccaacgaacgaatagagttttgggcggacccttccgttttccaataaccgcgatgagcgatcacctttgtctttcttttagccgacacgggaaccgccatcagtacacacaaaagaaaaagaagagagagtttcaagtgtttcataacgagagaataagttcaatgaaattattttccaatctccgacaaatagcgttccgcctcgattgcagccgcacaaccgctacctgcagccgtaatggcttggcgataatgtggatcagccacgtctccggctgcaaatacccccggcactcttgtcttcggcgtacccggaaccgtcttaatatagccaacctcgtctgtttcgacccagggtttgaatatcttggaattcggagtatgaccgatagccaagaagaaaccgtcaattgctatatccaccttttcttcgtccggttcacccatccgttttaccagatgtgcaccttcgacaccgtcttcaccgaaaagaccgatcgtgttatgctcgaacaagaccgtgatattcggagtgttcaggacacgttcctgcatgactttggatgcacgcaaatacggtttgcggacaatcagatacacttgttttgccaagctggacagataaagtgcttcttcacaagccgtatcaccaccacctacaacagccaccactttcttacgatagaaaaaaccgtcgcaagtcgcacaagccgaaacacccattccggcatatttctgctcatccggcaatcctaaatatttggcagtcgcaccggtcgagatgatcagcgtttccgtctcaatcactttctcaccgtcaatcgtcactttatagggagcagcagacaaatctgtctcagtcgcaatgccaacgcggatatcagcaccgaaacgggcagcctgcttccgcaagtcttccatcagttccgtaccggtaacgccttcgggataaccgggaaaattctctacttcggtagtagtcgtaagctgtccgcctggctgaatgccttcgtagaggacaggggacagatttgcacgtgatgcatagatagccgcagtataaccggcagggcctgaaccgataatcaggcaacgaactttttcattctgagttgtattcatcgttttatgatttatgagttatgattgataatttatggattatgatttatgcgtcgataataaaatcataattcataaatcacctcaaatctattatttcagcatcaggatagtctttttcgttaaaaacaaaatagctatccggttggtttactcccgttttcattttgctgatacggatcgtactgctgatcccattctttgaaaaaacggcgatcgaagccggaagaccagaaaacttctctatctggagctccacccgtacgatatcgcttttctttttaggaaccagctcgatatcatgagcagctttgccgctcggagccgtgctctcgcccttatatttagcggtaaatcctttttcataggaacggagcaacagggccggattcgtagcctgcaactcctcgccggtcggggtggaaacattgacttcctcattacgctcgacaaacgaccattgtgtcgttccatcaaaccaagtgatcatatcaggagtcttcagtacaaatttatcacctttaatatcgaccgtaccatcaaagctttccgacactttctgcacatccgaacgtgtctgcatcgtaaagtaagcagtcaagccgttagaatcttcataagcagaagcagccttatccaaaatggacgtagcgttctgtgccaataccctcacaccggatatagtccaaaaacacaggaaaacaacagccaaaatgcggcaaacttttattttattatctcttttcatgtcgttttttatttatgatttaaactcccaatcattagcagatctcaaaaagggcttatagcactcaaaacatgtcaatatagataaaccaacaacccatccccataactcataaatcatttcaacgaattcaacaactgctccaggctgtattcgtcctgaatcaagacctgacgggctttactaccctcgaaaggaccgacaatacccgccgcctccaattgatccatcaagcgacctgcacggttgtaaccgattgcaaactttcgctggataagcgaagtcgaaccctgctgctggatcacaatcagacgggctgcttcatcgaacaacgggtcccgatccgacagatccaccgtcccggccgaagaagattcaccgccttcacctatatattcaggcaacaaataagcagtcggataagccacctgcgcaccgacataattcacgatatcttccacttccggcgtatcgacaaacgcacactgaacacgcgtcggctcgctgcttccggtaatcagaaccagcatatctcccttaccgatcaaacggttagcccccggggtatccaaaatcgtacgggagtcaatctgagacatcaccttaaacgcaatacggctcgggaagttactcttgatcgtccctgtaatcactttcgtatccgggcgctgggttgccaagatcatatggataccaaccgcacgagccttagccgctatacgcgagatcggcaactcgatctctttgccagaagtcgcaatcaagtcggcaaactcatcgacgattgcaacgatataaggcagaaaccgatgtcctttctccggattcagacggcgggaaatgaatttttcattatattcctttatattacgcgccgaagcctccaccaataatttataacgattttccatctcgatcaccaaagagttcaaagtcgccaccgcatcccccggctccgtcacgatcggtttgtcggcattcggcaatttcgccagataatggcgttcgatcttcgaataaatgctaaattccacctgcttgggatcgaccatcacgaacttcaattcggccggatgcttcttatacagcaaagaggtgataatcgcattcaagccgaccgatttaccttgtccggtcgcaccagccaccaacaggtggggagtcttgcacaagtcgaacataaacacttcgttgacaatcgtccttccgatcgccaccggcaaatcatacgtacattcctggaatttacgcgaagcgaccaccgactgcatcgaaacagtctgcggcttattgttcggaacctcgattccgatcgttcctttacccggcatcggtgcgataatacggatctgcaaggctgaaaggctcaaagcaatgtcatcttccagattcttaatcttggaaatacgcacacctgcttccgggatgatctcatagagcgtaaccgtcggtccgaccgtcgccttgatagaagcgatattgataccgaagtcctccaacgtccgcttgatcatctgctggttctcttccaattcttcgcggtttacctcgacattgcccgaatcataaaatttcaacaggtcgagcgtcgggaacatataacgggacaagtccaggcgtggatcatatttacccaattgagactgatcgaattcctcctcttcttcgggcacttccacttcgaaaatcgtgttattgccattgccggcctcgacaaccggatcatccccacgggctacttcaaattcaaaatcatccttttgcaggacttccgtttccacctcggctttccgcatctcggtttccgtatcgaaaacatactcgtccggcccgatgttttcttctactgtctcatgatatgcaacaggctgaggtgcagccgccgttttttcaacaggggcataaacctctgcttccccttccacatcttcttcctcttccggcacttccgtcgtttcactcttatcccgtttcaaacggttctttagccatccgaaagagaagacattttgcaggaacgggatcgtccgtttactggtgaagatcgcaacaatcaggaacaagccgaccagcagcaggaccgttcccggtatcccgatattattcatcatcacctccgacaaataatatccgtgctgtccccccaaataaataaacgtatcttcatatccgcggataaagataaaagcaaagaacaacgatccccatatcagcatggccgcactgaacaggaaacgtttcaacaacgatacccggctcaggttcattagcttcgctccgactgaaccgaggaaaaacaggatcaggaaagaagaaatcccaaaccaccggttcatcagcaaatcggcaagaaaagccccgcgcacccccgtccagttctctactgatccacgattgatcaccaggtccgacaacgggatattctcgatcttgctctggtccgcccctcccgtaaagaaaaacgaaatcaatgccagacctacatatatggtaacaatggaaataaccaatccggtaataaaacgggtccgctcgctggtaaaaaagttccgaatccctttaaatttactttccccgttattcgtattttgttttgcagtcgtctttttagccattacacaattaaatttacaacacgcaaatgtacatagaaaatttcaagttccctacgacattcgcatttcccttaggctccaatctcaaaattccggcaaaacatttgggtgcggtatcctatattagctttacaaagaaaaaattactacttttgcagattataaacgcaaggtatctactaagataattagcatggaaaaagagaacaacccgatatacgaacgcaatacgctggaattcgtaacagttgcactggaattttgtacgtttgtcgagaacgccggcaataccggtcttttcgactttctggataaggcagtcaagatcttgcccttgctgtatctgaaagccacccttctacccgaagcggaagaagacgaagatgcagaaccggaattgaccgtcacggaagatatgtacgaatcggtccgcaaccggatcgccggactgctcggagaaaaagactcctatctcgaaacgttccatccggatatgcaatacagcgacacgccgatcgccgcctttatctcggagaatctggccgatgtttaccaagatacgggtaatttcatctctctgttccgtcaaggcaatgaagaagttatgctcgaggcaatcgtattgtgtcgtaaaaacttctgcgaattctggggacaacaattattaaacgcattaaaagcactccacgccgtgcgatacagcgatgaagaacttttagaaaccgacaaagaagaatgacacaacaatacacacattcgataacaaaagaggcaatatccgagcttcccttagaagaatttaccggaaggatcattgtgatcgacacattgagggatgttgagaaagcagtcggctacctctccgaattccagtccgtcgggttcgacacggaaacccgtccgagcttcaagaaaggacaacgttacaaaatatcgcttatgcaaatatcgaccgacgaagcctgttttctgttccgcctgaaccggatcggtattccggaagcattggaagaatttctggcgaatgaaaaggtgctgaagataggcctttcactgcgcgacgatttcggggcgatgcggaaacgcacggacatacaacccgccaacttcctggacttgcagaattatgtcgggcagttcggcatcgaagacgccagcctgcaaaagatatacgccatcctcttcaacaagaaaatctcgaaaggacagcgtctgagcaactgggaagccgacgtcctcagcgacgcacagaaaaaatatgcagcccttgacgcatgggcctgcctgaaaatatacaatcaattgaaacagatataaatgaaggagtgtaaagtatttctcaaaccgaaaaaagaggaatcgttgctacgtttccacccgtgggtattctccggtgctatccaaacaatcgaaggtgaaccggaagaaggcgacttggtagaagtttatggtacgaacggacgctttttaggtatcggacattatcagataggcagtatcgccgtacgcatcttatctttcaagccggtcacgatagatgccgctttctgggaagaacgcatccgtatcgcttacacactgcgccagacactggaacttgccggagtggagaacaacaatacatatcgattggtgcatggagaaggagataatcttccgggactagtcatcgacatgtatgcccacaccgccgtcatgcaggcgcattctgtcggcatgcactatgcacgccatcagattgccgaagccctgaaagccgtgttgggagattctttacagaacatatattacaaatcggaagcgactttgccttacaaggccaacttagacagcgaagacggctacctgtacggtggtgaagtggaggacatcgctcttgagaacggcctgaaattctgtgtcgactggcaaaaggggcaaaagactggtttctttgtcgatcagcgcgaaaaccggtcgttgctggaacgctatgccaaaggacgttccgtactgaacatgttctgctacactggcggcttctcgttctacgccatgcggggaggagccaaggtcgttcactcggtcgacagctctgccaaagcgatctcgctgaccaacaggaacgtggaattgaactttccaggcgatccgcgccacgaagcttatgcggaagacgctttcaaatatctcgaaaagatgggaagcaactacgatctcatcatcctggatccaccagctttcgccaaacataaaaacgtattgcgcaatgccttgcaaggttaccgcaaactgaacgccatcgctttcgaaaagatcaagccaggaggtatcctgttcaccttctcctgctcgcaggtggtaagcaaagaaaatttccgtctggccgtattcagtgctgccgcccagtccgggcgtagtgtccgtatcctgcaccaactgacacaacccgccgaccatccggtcaacatttaccatccggaaggggaatatctgaaagggctggtactttatgtagagtgagaagaggtatgaattatgatttatgacttatgcatcgatgataaatgataaatcataattcataaatttaactgaggaaggcataaaatatatacggaaatatttctttatttcgtaataggttgtacctttgtctcgcttttaagagagatagaagtattattatataagtaaaacataaaaacttattattatgtctaaagtaacagttgttggcgccggtaatgtaggtgctacttgcgcaaatgttcttgccttcaatgaagtggcagacgaagttgtaatgcttgacgttaaggaaggggtttccgaaggtaaagcaatggatatgatgcagactgctcaactgctgggtttcgatactacagttacaggttgcacaaacgactacgaaaaaacagctaactctgacgttgttgtcatcacttcaggtattcctcgtaaaccaggtatgactcgcgaagaactgatcggtgttaacgctggtatcgttaagagtgttgctcagaacatcctgaaatattctccgaacgcaatcctggtagtgatctccaacccgatggatacaatgacttacctgtcattgaagtctctgggtctgccgaaaaaccgtatcatcggtatgggcggtgctctggatagctcccgtttcaaatatttcttgtcacaggctttaggttgcaatgctaacgaagtcgaaggtatggtaatcggcggtcacggtgacacgactatgatcccgttggctcgtctggctacttacaaaggtattcccgtaagtaagttgttgagcgctgaaaaactgcaggaagttgtcgcttccactatggtcggcggtgctacactgactaagctgttaggtacttccgcatggtatgcaccgggtgcagcaggagcttatgttgtcgagtctatcatccacaaccagaagaagatgattccttgttccgtttacttggaaggtgaatacggagaatccgatctttgcatcggcgttcctgttatcctgggtaagaacggtatcgaaaagatcgttgaactggaattgacagctgaagaaaaagaactcttcgccaagagtgcagcagccgttcacaaaacaaacgaagcgttgaaagaagtcggcgctctttaataatcggaaaaaaggtttgataatatagaaaagaggatagtccttcggggttatcctctttttgtctatacaccttctccatcttatagttcatattaaatgatataagttcattttttggcagatatgaatcatttcaacttcacccacctttgacacctttcgattatcatgtcatacaagggtgaaggcagacaaccggactgccttcacctcaaaaatttgccttcaccctgtctcgtccagattcgggttggccatgcccccatcttcacattcacctatatatattaaatgaaaaacaaggatactacaatatcaattaatcaacaaatacacaggtattaacagctatttctaccactccttaccttttcgcccttagtcgaaaaggtttttgaccagtgtcgaaagggcttttgaccaagggcgaaaaggttttcgactaaaggcaaaaggtctatgagcaggctgtttgacaatagaagcatgccaattgtcacttaaattagcagatttaaaccataacttacttcaattcccgaatcttgatattgcggaaccagatcggataaccatgatcctgcaagccgatatacccttcatgggaaatgccttcctggaaaccttggaaatctttgaatttgctattggcaaccatatcatcccattctttgctccacaaggtatactgaacgaccttctttccattctgggtatgcgtcactttgccatccttcaccttgatcacgatcgtgttccattcgccggcaggttttaccgttttcggatcggcagggagcatatcatacaaagaaccggcaaggtggtttgccagcttgttgtcggttgcatccacattatccagaacctgtacttcgggagctgcataatagatcggtttgcccggaacttcgcgtacataatagaagatacctgaatttcccattttactggttttccaatctacagacagctcaaagttcttgaacttcttttccttatacaggatatcgcctcctgcaccgtgtccaggttttttgcccggagcggtaaagactttcatcgcctcgtcttcgattacccagttcgatgccataccggtactgttacattgtctccaaccggtaaaatctttcccgttgaacagcaaagtccaaccttgtttcttttctttttcagtcaacgtgttattcgctttttgcgcaaaagaagggacagcagccataactgctaaaagaaccacaaacgatttaaataagtttttcatgttacatttcatttttagattagacattgagaatataaaactcaacaaagataaataaaaaaagagctgctccataaagaacaactctttcttttctgtcggataatcctattttatttgatgatgcccaatttcgaagcactgatgaagtcgatgatatgctggatttcgtcgctcatcggcacctggtccttaatcatcagcaaggcatcgaatatactggtgttaccttgatagatgatacggtaagcatggctgatatgttttacgatcttttcgctcatgccttcgtgcatcaggattacggagtttaccccgtaataggtcgtcggctccaatgcagccacgatataaggaggcacatccttgcggaagcggcaaccggtctgcgtcatcgaccaggttccgacacgacatccctggctcaccagcacgttacctccgaaaatcacataatcttcaatcatgcagttgccggaaatcttgctcccgtatccgaacacactgtgattgccgatatgcgtgtcgtgggaaacatgcacgccttcatgcaggaaattgccattaccgataaccgtcttcccgccagaattggtcgcacggttgatcactacgttttcacggatcacattgtcatctccgatttcgacgatcgtatcatctcccttatagttaaaatcctgcggttcggcagcaatgacagcaccattgaagatgcggttcctctttcccatacgggttccactcatgatactgacatgaggcatgatctcgcagtcatcaccgatttctacattcttatcgatgtatgcaaacggatggacggttacgttcgctcctaacttcgcgcttgcatctacataagctaacggactaatcataataatcaccttttaaattgtcaattgctttttactctcttccgccaccgacggcactatataaattgataacagcctgcatacgctggacattgtcggagacttccgtcaactgcgcactgagcagactctgctgggcagaaagaatttccagataagtggactgtccggattggaacaaagcattagtataggttaccgccttttccaactcttctatctgagccttgtcctggataagttttctattggtagcatcataaagatgcaaagcgtcactcacttcctttcccgcttccagaatcgtctgctggtagttcatcttggcaatctgttcttccgcttttgagattttcaggttggccaccagcttaccattgttaaagataggctgtgccaacgaagccaacgcctgaaacataaactgtcccggattggaaaccgtaacacccgaaccattcgtccaaccggctgtcgccgtaatattgattcccggataaaaagcggcacgggccttattagtcgtataataagcgctggccaatgtcatctcggccaccttcacatccggacggttttccaacaactgcaaaggaacaccagccatcagctcttcaggcatcacctggtcttcaagcgtactgcggtcgataggctgcggtgctttcgctagcaatacagataaggagttctccacttcacgcacctgacgcttcagttcgatcaacgaaccggatacctgatggtacacggcacgcatctggacgactgcggcttctgttgtcatgccggcaaccttcatcgcctccatagcccgcacattttctttgtagatatctaccgtcttggaagtaatctccacctggcggtccaacatcaacagagtgaagtaggcattggcgattccgccgatcagctgcgaacgtatcgcttgctgcgtgtactggctctgcaagtaagcggctttctgcccgcggctcgcattcaatagtttaccaaacaaatcgacttcccagctagctgccgccggcaaggtataggctttcacataccccgtattttccattttggttatggttccttgcggagccagattcaaagaagggaggaaagacaggcgagcggaagtcagcaacaatttggcctcctctaccctcaggatagcggcttgcatatccacattgtttgccaatccctcttcgatcaaggcctgcaatttaggatcacgaaaaacttccttccagggcaagtttcccatattggccgtatctgttgctgccaacgtgtcggtggcagagaccggatcacggtagataccggaagtttcgatcgtatccggacggtcatatgccttatagatatggcaactgctcaaaagagcggttgcacataccatatatataatctgtttcttcattgtcatctcttattttgtttttgcgtactgttctatttccgtattcatatcgctgttatccaaatcttcccattcgataggtttgaatttctcctgcaagtactggaataccacaaacaaaaccggaacaataaaaatctggaagatcataccgatgaacatacctccgatggcggcagtacccaaagtacggttaccgtgagcacctacaccgaacgcgaacatcataggcaacagaccgactaccatagccaacgatgtcatcaggataggacgtagacgagcggcagcacctaaaacggcagcccacgtgatactcatacccatacggcgacggtcgagggcaaactctacgatcaggatggcgttcttcgccaacaaaccgaccaacatgatcaaggcgatctgcatatatatattgttggacatcgtacctaagatcatcttcaaagccgggatattacccaaagcagcccacccctgcacgaacaggaagctacccatcaaaccgaacggaatggaaagcaatactgccaacggcagaatataactttcatactgggcgctcagcagcaaataaacgaagacgaaacagagcaggaagatcaaaccggtcgtgctgccgctggtttcagcctcttcacgtgccataccacccaactcgtatccgaaaccggtcggaagcgtcgtaccggcaacctcctcgattgctttcaatgcctggccactggtgtatccatccgccggcgcaaccatcactttgatagaggtatacatattgaaacggctgatgatatccggtccatacactttcttgatagacacgaactgcgagattggagccatttcgtttccattgcggactttgatattcttcaacgattccaaattggtacgcaaagccggatcagcctggaccatcacacggtacatctttccgaaacggttgaagttggaggcatacaaaccaccataatatccctgcatggttgccagaatatcactcggactgatacccactttcttgcaggcagccgcatcgatgtcgatcatatactgcgggaagttagggttgaaggtactctgtgccgacttgatttcaggacgggcagtcaaagctgccgtatattgcttcgtcacatcgaagaatttttccagatcgccaccggtcttatcctgcatgttcaactcgatatcgctggatgcggaataccctgggatcataggcggagtaaagaacagcacctgtgcatccttcactatcttttgcgcacgcatgaacaaactaccatacacgatatccgaactctgcatcatggaacgctcctcccagtctttcaacttgataatgaacgaaccgtatgaaggcccctggccaccgataaagctgaaaccaataatggccgtacgcgatttgactgccgggtcggcagcgatcaggctatccaccttgttcatcacctctatcgtacgttcctgggatgttcccggaggcagcgtcactgcgcccatgatcgtaccggtatcttcattcggaaccatacctgtcggagtcgcattcatcaaaacaacaagcaagacgatacatccggcaacgataccgaacgaaagccatttcttttggataaagaatacgacacgttttttatagctgttcagcaaagagtcgtatgcggcattgaaagaagagtggaaacgggagacgaaggtcgatttcttctcatgcccttcttcgtgcggcttcaagaacatcgcgcacagagccggactcaacgtcaaggcgttcaatgcagacaaaccgatcgagatagccatcgtcaaaccgaactggcgatagaatgtaccggccgtaccgctcatgaaacttaccggaataaacacggacatcatgaccaacgtaatggagacgatagcaccgcccagctcgttcatggcatcgatagaagccagtttcgctgatttgtatccctggtccaacttggcatggacaccctcgacgaccacgatcgcatcatcgaccacgatcgcaatggcgagcaccatggcacaaagagtcagcaagttcaagctaaagccgatcagcgacagcatgaagaacgtaccgatcaacgcaaccgggatcgcgatagccggaatcaaagtcgaacgtaaatcctgcaagaagatatacacaacgataaataccaggatgaaggcttcgatcaacgtcttgagcacctcatggatagaagcgtacaagaagtcgttggcattcataccgatgtcgatcttcaagcccggaggcaatatcttttctgtttcttccagtaggttctggatattattgatggtttccgtcgcattggttcctgccatctgataaacgatacaagttacggcactatgaccgtttactttattgacaaagttataagtcagacgtcccaattcgatatcggcgatatctttcatacggagcacttcaccatccggcaaagctttcacaaccatgttctcaaattcgttcacttcctgcaaacgtcccttataacggatcgtatactggaaactctggttaccctgttcaccaaacgaacccggagcggcttccacgttctgctcagccaagacgcctgcaacgtcattcggaaccagtttgtactgtgccatcacatccggcttcagccaaatacgcatggaatagtctgttcctaacacgtttgcatcacccacaccaggtacacgctgtacttccggaatcaggttgatcttggcatagttctcgataaatcgctggtcgtaacggtcctcggcatcataaacagagaacacgatcaacatggagttctgacgtttctgagtcgtcacaccgatcttggttacttcggccggcagcaaaccttgtgccatggaaacacgattctgtacattgacggcagccatgtcaggatcggtaccctgtttaaaataaatggagatttcggccgatccgttattcgaagccgatgaagtcatgtacatcatgttctccacaccattgatctggtcttccagcggcgcaatcacactattcaataccgtctgtgcgtttgcccccgtataagtagctctcaccgaaacggttggaggggcaatatccggatattgggtaataggcaaggacagcaagcctaatatacccagtatgacaatcaagatggagatcaccgttgagagcaccgggcggtttataaatctatctaatttcatatcttctgtttttaacgaacaaatggaagttattaattaaaagcggtcttcagattaccttcgttctggtctttcaaggcctgatcatatttcgctttctgctgttccggcgtgatcggctcgatagcctggccgtcatggaggttctgtacgccttcgatcacgattttgtcaccggatttcaaaccattcgtcaccaggtaattcttcccgtcatccagattagagatctgaatctccgtattcttcacggaattgtccgcctgcaagacgaaaacaaactttttgtcctggatttcgacagtagcggactgagggataataataatcccatccatcgtgtatgggaatatgatgttgccggtaccgccgcttctcaatatatttttatcattcgggaaaacagcacgcatgctgacagacccggttgactggtcgattacaccgctaacggcatcgatcttgccttccgactgataggttgtgccgtcggacagctgcaagcggacagccggcatcttttccagctgttctttcaaagtgcccccggctcttgtcaagcgcaataactctttctccgtcatagaaaaataaacatacacgtcgttgatttcggatacggttgtcaacggctgcgaaacagaagggctgaccagacttccgatacggtacggaaatgtaccgacaacgccattcgacgggcttgtcaccgtacagaaagataaattctgatttgcgcttaccaaagatgcttctgcctgagccaggcttgccttggcagacataagctggttgaccgctgtctgatactcaaaatcactgataatcttctgatcgaacaaagcctttttattcttttcggtcagggtcaaagtagcgacattggctttagccatctcgacagccgcttttgcctgtccgactgcagcagcatactgggtcggatcgatctggaacaaagcctgccctttacgaactgttgctccttcatccacacataacttaacgataaaacccgaaacctgggggcgtacctcaatatcctgcgttcctctgatcgtcgccggataggatgttgtctggtcgctcgttgtcgaattgacagcaaggacagcaaattcattatcccctaacttcataccgctttgattgttcccgcaagcggttaataaagatacccctactgcaaacaatgcaatttgccttaattgggtaatagtagttctcaacatttgtttatccatattcattattatatatcttctatactattcttgttttagtcattagaaggccatcaaaaagccatcgcaacgggtgagatccgctgcatccatagtaaaaaaattccacaacgatgctgtcctaaacttatgggttcatagcctattcctcataaaaagcgtacaaatgtagaatctttttgttgtactttttccgtttatacaatcttttatactaaaaaattgcttattttatatttctgtatcagagatatattgagaatttgaccaatcgaaaatatattcgtttaaattgatacataattttaacacagaatttgtttattcaataatttatcctaattttacggcttatataacctaaataatcaattcatatggaaccaaagtttatgatatcggaagtgttcggcacttcatggaagtacactaaatctcagatctgggtactggtagggctgtttatcggatattttatcctgtcatcaatcattagtctgttcggtatgccagcgcaaggttcgatggtcggtaagatcatcgtgaatctgatcagtgccgtcatatccagtgctttcatgttgggctacataaaaaatctgttccagacaatggatggagaagaaccacagttttccgcatacgggcagcaatcccgtaaaatcttcacttatcttattgccagtatcattatggggatcgcagtggctatcggaatattcttactgattgttccgggtatctatctggctatccgcctgcaattttattctgcctatatcgtagaggaagactgcggaattatagaatcactgcaaaaaagctgggacttgactaaaggacaggggatgccgttgtttttattactgttggccatgatcggcactgcgatcgtcggttgcatcttgttcttcgtcggactctttgtcgccgttcctcttatctatatgatgcagtgctacacattcagaaaattaaatacgatttcaacagaagaagaagtacaacaactataatatcaaatcataaatagacaacagcccgcaaaaataaacattctgcgggctgtatagctttccgatctatgggtaagacatatagaatcaaagacattgcagagatgtccggagtttcgaccggaaccgtcgaccgcatattgcacaaccgaggcaaagtatccgaagaggcacagaaaaaagtagaaaaagttttaaaagaaatagactatcacccgaacctgatagcccgttcccttgcactaaaaaagaactaccattttatcactctgattccttcttttgcaaaaggcgaatattgggataaactttgcgaaggaatagataaagcagagcaggaacttttcagctacaacgtagaagtcgaacgtatgtgcttcaatcaatacgacaaaagcagtttcgacgagctcattccccggatcgaaaaagccgactgtcagggagtcgtgattgcaacacagttccatgacagtgtcgtcaagttggcatcccggctggatcagttacaaataccttacatactgatagacgcattcattgaaaacaccaattgcgtggcctattacgggaccaactcgtatgattccggatacattgccggccgtttgctatacgaacaaatcaacccgaccgaaaatatcgcaatcttccgctttatccgcaaaggagaaatgcaggtaacccaggtcatgaaacgcgaggaaggcttcaggaattatctggcagaaaagaactatgacggacgtatctattccgtacaattacatgccgacgaaccggaaaagaacataagcatactgaatactttcttagaagagcataaagaggtgaacgcaggtatcatattcaactcccgtgcccacttactgggaaaatacttccgcgataaaggagagaaattcagattgatcggctatgatgtgatagacccgaatatcacttgcctaaatgacggttccatcacgcacctgatcgcccaacggccggaagtgcagggattcaattgcatacgggcactgttccgccatttagtcctcaaagaaaaagtggaacagatcaattatatgccgattgatatcctgatgaaagagaatatcaaatactataacaattatatttgaaaacataaaaaggtattttttatccgttttctttttgtttgataaataaatactatacttttgtgcccaatgtgtgcgcgagcacaatgagatagtaacaatgaaattatcacaatcataaacaataaaaatatggctaatttattttgcgttaaagacaaagttgtcattattaccggtggagccgggatcttgggcagaggtattgctggtcaccttgctgaagaaggtgctaaaatcgttattcttgaccgtgcagccgaagttggtgaacaaattgtagccgacatcaaagctaaaggaggagaagcaagcttcttcctgaccgacgtattaaacaaagaaattctggaacagaacaaaaaagatatcctggccaaatatggtcgtatcgatgcattgctgaatgcagccggcggtaatatggctggcgcgaccatcggaccggacagcacgattttcgacctgaacatcgacgctttccgtaaggtggtagacctgaatctgttcggaacagttctcccgacaatggtatttgccgatgtaatggctaaccaaagagaaggtgctatcgttaacttctcttccgaatccgccttgcgcccgcttacccgcgtcgtgggttatggtgctgccaaagccgccatttccaacctgactaaatacctggccggtgaactggcaatcaaattcggagaaggtttgcgtgtaaatgcaattgctccgggattcttcctgacggagcagaaccgtactttgatgacaaatccggacggatcttacactccacgtgctgaatctgtcattgcacatactccgttcagacgtctgggtacaccggatgaattatttggtacaatccaatacttgatcagcgacgcttccaaattcgtaaccggaacaatcgctatcgtagacggtggttttgatgcattctctatttaatctcacaattaaaaacaagacattatgtatttatgtgaacaaacatggcgctggtacggaccgaacgatcctgttagtctttccgatatccgccaagccggcgctaccggaattgtaaatgccttgcatcatatcccgaacggagaagtatggactgtcgaagaaatacagaaacgcaaggatatgatcgaagcagccggcttacgctggagcgtagtggaaagtgttcccgtacacgaacatatcaaaacacaaagtggagacttccagaaatatatcgacaactataaagaaagtatccgtaacttggctgcatgtgacatccgtgtgattacttacaattttatgccggttctggactggacccgtacaaacttggcttacaccatgcctgacggctctaaagcattacgtttcgaacgtgcagcttttatggctttcgatctctacatcctgaaacgccctgctgcagaacaggaatatacagacgaagaaaaagcaatcgcaaaagcccgtttcgacgagatgagcgaagatgacaaagcactgctagtacgcaatatgatcgctggcctgcccggctccgaggaaagtttcacattggatcaattccgggccgaactggatcgttacaaagacatcgatgcggaaagactccgcgccaacttgatttatttcctgaaagagattactccggttgctgacgaagtaggcgcacgtatggttatccatccggatgatcctccctactcgatcttaggcttgccccgtatcttgagcactgaagaggatttccgcaagttgatcgaagccgtaccaaacaaaagcaacggtttatgcctctgtaccggctcattcggtgttcgtggggataatgacctagccggtatgatgaaacggttcggtgaccgtatcgacttcgtccatatacgtagtaccaaacgcgatgaagccggaaacttcttcgaagcaaacctgctggaaggagacgtaaacgtttatgaagtaatgaaagcccttcttgaaatcgagcaggaacgcggttgctcaatcgcaatgcgtccggatcacgggcatcagatgatcgatgacttacacaagaagactaatccaggttattcctgtatcggtcgtttgcgtagtttggctgaattgcgtggtttagaactgggtattgcctgttctttattcaaataatgagtgacgagtaatcacaaatagtttggcattgaaaggcgtctgattctttttcggacgcctttttcattttacctctctcccgtttcactttttttcctatttttgtagtgtcaataattttacaaaatgtctaaaacacactacagcatattgtcagtcatattattactagtgttaagcgcatgccattctttgtggacggctcagacgcagcctgccctgcagcaggaatcaatcctggtcctgccaacaacggatattcctcttccaaacacagattttgcttttctgtttccggaagaaccgaaactgtacgaacaaacatctccccgcaaaaatataacagtaaacttctccaacagagaaaaaaatgatattgccgtaacggatccgctcctgatggcagatgagaattcgatgcttatcgatttaagcctgatacagaaagaagactatgctttccctttacccggcgcaaaagtaatctctccatatgccggacgtagaaaacaccattcgggtgtagatttgaaaacttgcgccaatgatacgatcatatcagcattcgacggaatcgtccgtctagctaagccttattatgcatacggaaacgtaattgttgtacgccattataacggattggaaacagtctatagccataactccaaaaatctggtcaagccgggagactatgtaaaagccggacaaccgattgcactgaccggacgcacaggaagagctacgacggaacaccttcattttgaagtacgggtaaacgggcaacacttcaatccgaatctggtattcgacctgcaagaacggaaacttaacaatcaatgcctggtattcacccaaaaaggtggcaaaattgcagtgaagcccgtcgaactaatgcctcatcagttcgcaggcgactacagttactcacctgcctcctgtaaaaacaaggaacagatagaaagcaaaaaggaaactctgtaaccccctttttcaatgcccctgcaaagcttctatcagaagattgatattaacggtaaacaaacggactgatatcgccaacaaaataataccgaagaacttccggataatatagattccgccttttccgaaaaagcgttcgatacgggctgtcatgcgaacgacaaaatagacccatatcatattcagtattaaggctatcacaatattgacactagcatactccgccctcaaagataataatgtggtaaacgaaccggcacccgccagtaaaggaaagaccaacggaaccagtgtcgcctcctttatcggtccctgatttttaaagatttctatatcgagtatcatttccagtgataacaggaaaataacaaacgaacctgccactgcaaacgattcgatatccacatggaaaagccgtagcaggacatcgcctgcgtagaagaacccaatcatcaacaaaaaagagataaccgttgccttcatagcattcacgtccttacccttttctttcaaattgataataattggaatggaaccaataatatcaatcacagcaaataacacaatgaatgcactgatcatttgctgaaaatcaaaactttcaaacataagatacccttttaattgctctaaagatacaaaatcttttccaagagtcgactgacaaatagtaacaatcgcttcgatagacaacgttttttcatactaaatcagaatctcttcacgaaaaaatagcgacctttgcatacacttatattgctccaagcaagaaagtaattaaatgttgtcgggagatatggatataaaaacgattttaaaaaagtatttggtatttgtctttggattatattttttagctgcaggaattgtcctgattatacattccgctttaggaacgactcctatttcaagtgtaaattatgtgttaagcctcaacagccctctttctttagggacctgtacctttatcgtaaacgtattgctgatactaggacagttctggttaatccgagggacgaaaagccgtcaagaccaaatatctatcctgttgcaaattccattttcgttcatattttcaacattcatagatttcaatatgtcactcgctgaagacctgcatccatccaattatataacgtcgattgcgctgttactgttgggttgtctcatccagtctattggtgtcgtattagaaatcaaaccccaggttgcgatgatgagtgcagaaggattcgtcaactacgccgcccgccgttacaataaagagttcggaaaattcaaggtcattttcgatttcactttagtaacggtcgccatcattttatcactgatcttcactcaacggatcgaaggagtcagagaaggctctctgatagcagcctgcatcacaggctatatcgtgagtttcctgaacaataaaatcatgactcgaaaaatgctttccagggtttcttccatactatcaaacctcgctttcaatacgaatattaattgcattcattcccctcagaccgcgttcaagttcaaaagtaacgatgtcggtttccgaaatatcggtcagtgtattattactaacatgaaaaaaatacttctcgtcgctaccaaggtctttgataaaaccatatccttttgattcattaaaataatcaaccctccctttcagcacggtaggtgtctctatatcttctttttttggggtagagataagaatatcttcttgcttaatttcttctttattaggattcaattcgggaggagtcgatgtaatcacgccgttttcatccacataagcgatcatatcatcaaaactattcgctttgccaagcaattttctgtcttctttctttttttgtttttcggcccttcgggcttgtttctttttttcgttttctcgtttattgtatgttacggattttgccatttatctatatttatttatattaataatcaatctattttgtaagaattcaaagtagaatgccaagatatttccggtatatggaaatgcaggatataaaaaaaccaaatcctctggatcttcctgtttctctatccatgataacttttgcagatgtaatttctccatactctgcaaataaatcattcaaatcagcatcattaatgctataatttaagcctgtaatgtaaatgttcatttaaaattttatttttaataaatactaattagggtatgaggaggaaaattaatggagaggcctacttaataataaagaagaactatacgctaataatacgtaactcaaactctgacccaaagataacactattaatcgaaccaacaactattacaagctataaattctcgtttttcttgttaagactgtcaaaacataatttctacccggatcagagctccgtttcacagaggttgttatcatctcaaaaactcctaaaccggacaatcagcaagagtctttttccgacaaagacaccctaccaaatgatcatttacaaaccctgtagcctgcatatgagcataacagatcgtagagccaaaaaacttaaaccctcgtttcttcatatccttgctcatcacatcagattctggggttgtaaccggaatctccttcaacgatttgaaattatttacaatcggtttctgttcagggaaaaacgataacgtataattatagaaactgccaaattccttttgaatcgcgatgaaacatctggcattcgtgatcgtggatgcaatcttcagccgattcctgacaatcccatcgaaaagcatcagccggtcaatatcatccgaggtcatcgcagctactttctcaacatcaaaattataaaatgcttttttatacccttcacgcttacgaagaatagtaatccaagccaatccagcctgggcactttccagaacaagaaattcgaataaggttttatcatcggtaaccaatttaccccattcctcatcgtgatatttcacatataaatcgtccgtaccagcccatccacagcgtctatttacaagatcttccatctttcataatttatgatcttcaaagatatttatttaagatgaatatacaagaaaggttgtctaaaaacttataggcaaatacattgaacgtcacatacaaaaaaatcccgaaacttttgaatttcgggatttttctttaatctattatttgctttcgcggtgcgtacgggactcgaacccgtgaccccatgcgtgacaggcatgtattctaaccagctgaactaacgcaccaaaatattatatgtgcggtccggacgggactcgaacccgcgaccccatgcgtgacaggcatgtattctaaccagctgaactaccgaaccattattttacttaactgctattcctctgaattgcgatgcaaaagtaggtagtttatttgaattacgcaagagttacacatatatattttttactatttttcaatcatccctgataataaacatcttacatctaaactttttttgttcatactctaagagcctgtttaaattttgcatttgtcggttgtgaaagttgttttgaggatgtttttctgtaggagatgccgtcttttttgttgaaacacgtgacttattttgcttcaaacaggcagaaaaagtgccgaagattcccgtttacaggctttttacacccggatgtgaacggtcttgacacccgagtgtcaatgatatcgagacccgggtgtcaatgagtttatcttattatgttattgaaaataagtaatgtgaaaaaaattatcagacaggtggttagtgatagtatgatagatggaataggcatccatcatacctactatcattgcttgtgtctattgatattcaattgataaaaggaaattagtgatagtatgacagttgtttttcaaaatatataaaagaacaaagctggccgatgaagaccatattttgcagtatccttacaagacaaagttactatttctgggccaacggggatttgagaaaaccatacaataaaccagccagtttatcacaaataacatctattctgcaacttttcataaagcagacatctatatgtcatgataatttgttagttttgcagctcaacataaaaaaggaagcaacaacaatggatgtcgccattatcaaatacaatgccggaaatatttattctgtgagttacgcactgaaaagactgggagtcgaagctacaatcacagcagacccggaactgttatgtaaagcagacaaagtaatctttccaggtgtcggtgaagcacataccacaatggagcacttgaaagagcataacttagatacaattataaaaggattgaagcagcctgttttaggaatttgcctcggcatgcagttgatgtgccgccattcggaagaaggagatgcgaattgtttaggcattttcgatacagaagtaaaacgtttcatcccgcagcaacacatggataaagttccgcacatgggatggaacacgattacgaacgttaaaggcggactgttcaacaaacaattagagaacaagtttgtttatttcgtacatagttattatgtacccgtaaacgaatacaccgccgcgacaaccgaatatatccttccgttcagtgcttccctgcataaagacaatttctatgcgacccagttccacccagaaaaaagcggttcggtcggcgaggttatattaagtaactttttaaaactataatgtaatatgatagagttgattccggcaatagatatgatcgacgggaaatgcgtacgcctcacccagggtgattacaacaccaagaaagtgtacaacgaagatcctctggaagtagccaagatgtttgaagatcatggcatcagacgtctgcatgtggtagacctagacggagcgcgacaagggcggatcatcaactatcgtatgttggaacggttggcgacacgtacttcgctgataattgattttggaggcggactgaaacaggaaggagacctggaaattgctttcgaaagtggtgcgcagatggttacgggcggaagcatcgctgtgaagaatccggaaatattcacttcctggatcaccaagttcggtccggaaaaaatcatcctcggagcagatgtcaaagataaaaaaatcgcgataagcggatgggaagagacgacagacaaagaactgatccctttcatccatgattattacgacaatggtatcacgaagacaatctgtacggacatcaatcgcgacggtatgctgcaaggacctgccatcgaattatataaagagatacaggaacaaatacctctactttatctgatagccagtggaggtatcagttctatacaagatattgaaaaactggctgaagcgggtattccggctgtcatcttcggtaaagcgatttacgagggaaagatacagctgaaagacttgatccgtttcacctgataaaaataaagattatatatgcttgccaagagaatagtaccctgtttggacataaaagatggaaaaaccgttaagggaatcaatttcgtaaacttccgcgatgccggcgacccggtcgaactgggtgcacaatacagccgggagggagcagacgaattggtatatctggatataactgcttcgcacgaagggcgtaagacatttacggaactggtaaagaaggttgcggccaatatcagcatccctttcacagttggcggcggcatcaacgagctgaaagatgtggaccgcctgttgagtgccggagccgataaggtttccatcaactcggcagccctacgcaatccgaaactgatcgaagagattgccaagaacttcggcagccaggtatgtgtggtcgccatcgacgccaatttcgaaatgggcgactggatatgctacttgaacggcggacgtattccgacggaaaaacatctcttccagtgggcggcagaagctgaaagcctgggagccggagaaatcctgtttaccagcatgacacacgacggtgtgaaagacggttacgccaatgaggcgttagctatgctggccgacaacctgcacattccagtcatcgcatcgggaggagccggaaaaatggaacacttccgcgacacattcgcccaagggaaggcggatgcggcgttagcggcaagcgtattccatttcggggaaatcggcattggagctctgaagcagtatctccacgaagaagggatcaacgtccgcctctgatggccacggcagagagtaaccgttccctatagaaagaaactctcgttccaggcaagtgaaactgtagttccatgcctataaaaccagaaacgaatgccgaagaacaaaaagttgcatacggatgaattaagaacaatataatagtcagataaaaaatgaaattagattttgaaaaaatgggcggcctgattcccgccatcgttcaggactacaacacaaacaaggtattgatgttgggctttatgaacgaagaagcttacgaagaaacaaaagctaccggtaaagtgacatttttcagccgtacgaaaaaccgtatctggatgaaaggtgaaaccagcggaaacactctgcaggtagtcaccattgctgccgattgcgacaacgacacactgttgatcaaggctattcccgccggtcccgtatgccacactggcgctgatacttgtttcggcgaaaagaatgtggaagacatcatgttccttaaatatttgcagaacttcatcgaacagcgccgccaggaaatgccggaaggttcctacaccactaccctgtttcagaaaggcatcaaccgtatggcacagaaggtaggcgaagaagccgtcgaaacagttatcgaagccactaacgggacagacgaccgtctcgtttacgaagcagccgacatgatctaccacctgatcgtattattgacaagcaaaggacttcgcatcgaagacctcgcacgcgaattaaaaagcagacataaaggataataacaatggaagagacaaccctgctcaaactggataaagtagatatctgccgtgaagagaatgtgatccttcacagggcatcctttacactccacaatggagaattcgtgtatgtgatcggaaaagtcggttctggcaagagcagcctgttgaaatccttgtattgcgaaattcccatcaatcaaggggacgcatggttgttggactataatctctgcaagatgagacggaaagacattccttacctgcgcaggaaattagggatcgtctttcaagacttccagcttcttaccgatcgttcggtacacaaaaatctcgaattcgtcctaaaagcgaccggatggaaaaagaaaagcgagataaacgagcgcatcaacaacgtgctttttcaagtcgggatgcaagataaaggctataagatgccgcacgagctttcgggtggcgagcaacagcgtatcgtgatcgcccgcgcattactgaacgatccggttttgatccttgcagacgaacctaccggaaacctggacccggagacaagcggacaaatcgtacagctgctacacgacatttgccgcaagggaacggctgtcatcatgacgactcacaactacacactggtacataactatcccgcgcgtatagtaaaatgtgagaatgcctgcctaagtgatgttggagaataattttttatgtaactttgcacacgcatttaaagtgaagaagaacaaattaatatagtaaaagaaaatgaaagttttaaagtttggcggtacttctgtgggatctgcacagagaatgaaagatgtagcaaaactgattacgggagaacgtaacattgtagtcttgtctgccatgtccggtacgaccaactcattggttgaaatctcggattacttgtacaagaaaaaccctgacggagcaaacgaggtcatcaataaactggctcagaaatattatggccatatcgaagaactctacagcactgacgaatataagcagaaagccaaagaactgataaaacatcatttcgaccatatccgcacgtttacaaaggatcttttcacgttgttcgaagaaaaagttgtcctggcccaaggcgaactgatctctaccggtatgatgaacctctatctgaacgaatgcggcataaactccgttctgattccggcactggattatatgcgtacagacaagaacgcggaaccggatccagtgtacattaaagaaaagcttatcaagctattagacggaaacaaggatgcagacctcttcataacacaaggctatatttgccgaaatgcttacggcgagatcgacaacttgcaacgtggtggcagcgactacagcgcctctctgatcggcgcggctatcggtgcagaagaaatccagatatggacagacatagacggcatgcacaacaacgatccgcgtattgttgaaaagacatcgccagtccgccatctgcattttgaagaagcagccgaactagcttatttcggtgccaagatcctgcatccgacctgcatcctgccggccaagctgaacaatattcctgttcgtttgttaaacacgatgcagccggaagctccgggcaccatgatctccaacatgacggaaaaagggaaaatcaaagctgtcgccgcaaaagacaatatcacttccatcaagatcaagagtggccgtatgttgttggctactggattcctacgaaaagtattcgaaatattcgaaaactaccagactcctatcgacatggtaacgacttccgaagtaggtgtttccgttacgatcgacaaccgcaagcatctggaagagatcgtggacgacctgaaaaagtatggaacggtcacggtagacgaagatatggttatcgtttgtgtggtaggtgacttggaatgggataatgttggtttcgaagctcggattgtccaagcgatgaaggacgtcccggtacgaatgatctcgtacggaggcagcaactacaacgtctcgctcctcattaaagcctccgacaaaacaagggcattgcaagcattaagcgatcatttattcaacaataaagcataaacaaaaaggatggcgtatcgaatcaatcaatacgccatcctttttcataagaaaataaaaaaagaaagggccgtcttcacagatgaccctttccaaccaaaaccttaactatgaaaaaatttacgtgctacaaatatagatatacttttttaattaccaaaagaaattcgaaaaaaatgatattaaaaggtacatttcctacagaaaagttcaaatcactggcaactccgttctatttttacgatataacgttgttgaaagaaacacttaatacggtaaaaacggaagccggaaagtatggctatcatgtccactatgcagtcaaggcaaacgccaatccccgcatcttgtctattattgcagaatatggcttgggagccgactgtgtgagtggcggtgaaatacaggcggcactcgatgcaggtttccctgccagaaaaatcgtttatgccggtgtcggcaaagcagactgggagatcaatttaggactggacaacgatattttctgcttcaacgtagaatcggctgccgaactggaaatcttggaagaattggctgccgccaaaaacaaagtggcctcgatcgcccttcgtatcaacccggaagtagacgctcatacacatgccaagatcacgactggtatgaaggaaaacaaattcggtatcaatttgagccagctcggacaggtgttagatttagtctgccgtctggaacatatcaaattgatcggcatccattgccatatcggctcacaaattacagatatggctgctttccgtggcctggtaatccgtgtcaatgaaattcaggaagagctggaggcgcgtggaataaaagttgagaatctgaacttcggtggcggtctcggtatcgattattatcacccgaatcatttgcctatcccggcattcgacaactattttgccgtgttcaacaaactattgcaacttcgtccgggacagcaggttcatttcgagccgggacgttccatcgtcgcacaatgcggttcgctgatttctaaagtactatatgtaaaagtcggcgagacaaagaaattctgtattttagatgccggcttcaccgaactgatccgcccggccatgtacgatgcataccaccgcatggagaatatcaccagcgacgaagaagttgaagtttatgacgttgtcggtccgatctgtgaatcgtccgacgtgttcggtaaagatgtcgaactgaaccgcgcccaccgtggcgacctgatcgccctccgctctgcaggtgcttacggcgaggtaatggcctcacaatataactgtcggaaattaccgacagctcattactcggatacgatgtaaaccctatttcaacattatagaatggtccatgcaaaaatcttttccatacaagcttttgcatggaccattattttatcaaaccgtctttcgaagtggtatccgtagtccgggtgatgtatttgttataaatatccaaaaatcctccgtacatttgtatcagcaaagacaatttaatatcgatgagcgaaaatttacttacattctccgacctggaattactcctaatcgggattactggcgtgttgtttatcatacaaatactttattatctgatcacatattcacgccctttacgtgctgcaacagccaaaagcacggaacgtgtcacggcagacaaggatgcccaacctgtctccgtcattgtctatgcccatggcgaaccggaagatttacgcaataatctaccgatattgctgaaccaggattatccggattatgagattattgttgtcaacgacggttccgatgccaatagcgaagacgttctgaaacttttttcaaatgaatacaaaaacctctattacacatatgtgcctgtagacactcaatacctgagccataaaaaacttgcgctcactatgggaatcaaggctgcccggcatgacatcctccttttcaccgaagcggactgccgcccgatcggtccgaaatggatcaaagcaatggccggttcctacaatcccgaaacggacattattttaggtttctgtgcgtatcggcatacaaaagggttcctgcacaagctcattgcctatgacaacctgacaaatgggttacaaatgatatcttcagccctctcccatcatcctttcacgggaaacggccggaacctatcctatcgtaagaaactgttctttgcccacaaaggttactccagatccctcaaccttcacgccggagcagacgatctgttcatcaatgaagtctcgaatcccgccaatacacaggtacaactctcgtccgattccatcattaagatgaacaaagtaggagattccgaaacctggagagagataaaaacctcccgcgccgccaccaaacgtttttacaaaagaggttccttaactttttaccgaatggaaaccatcggttatctgttcttctggattgcgggaatcgccactttcatcgtcgggctttcaggaaactggctgctctcgatattggccggattactcttattcctccgcttcacagtcaaagcactcgtttataaaaaatccgccttactcctgcaacaaaagccattaaccgcctggcttcctttgttggaaatcgctcaaccggtctatgacatatatatccacatttacaggatgttcaacgggaaaaaagattttacaaataatgtggcatgaaataatatgccaatgtgctaattggcatattattattcaaatcgaatactttttgccggatggattttggttatcaggtaggaaggcccaagcatcattaacatagcagcggccaatgtaccgatgttcagcaaaacaatggaaaagacggtcaggtcgataggaaccgcatccaaataataaacggacggatcaagctttacgacacggaaataagattgaacaagacaaagtacgatcccgattacattgccccatatcatccctttgccaatcaagaaaaaggatatatagaggaatatcttgcggatactggtgttattttcacccaaggccttcaaaataccgatcatgttcgtccgctccaagataataatcaacagtcccgaaatcatggtgaagccagcaacagcaaggatcagtatcagaatcaccaccacattaatatcctgcacctccagccagtcgaatatcatcggattcagttctttgatggagcgggtatagtatgtgttaccattccggtcttgcttctcagcaatatcaaaatacaaatcttcagcaaccctgtccaggtggtcataatcatccacttgcaattccaaaccgctcacctcgtcaggcgcccaaccattcaggcggcgtatctggcggatatcagctatcacaaacaacttgtcataatcaacaaaacccgtctcataaatacccgttatacggaatttacgagcacgcacttcgtcctgcacaaaataagtcaaaaaggaatctccaactttcagccccaacagattagccagataacgggagagcaacacatccgtagacaccttatcggtaggaaggataaacagctcaccctctttcagattattacgaaagaaagtccagtcatagtcccggcctacacctttcagcacgatcccctggaaatcactgtcggttttcaagattcccggcttcgtggcaaaaccttccacatgcgtaatgccgggaaaggttttcagatgctccaggagcgtatcgctcactgcaattggagtcgattcgtaagaagcattattatcaaagttcgtgatttggatatgtgagccgaaaccgatcactttattccgaatttccttcttaaaaccaatgactatagccaccgaaaggatcataacagccagtcctaaggctattccaatcatagcaatacgaacaacaggaggagtagcctgccggtccccctctttgctgaaatagatgcgttttgctataaaatattctaggctcaaagctattgagaattgaggattttggattgactagttttaattgtcaattgttcattgtaattcatttatactgtttttcccggatatgcctccagcgccttctgaagcaccacgagtgccttcgccagatcttcttttttcagaacataagccatacggacttcattcttccccaaccccggagtcgtatagaaaccagaagccggagccatcatgaccgtttgcccttcatattcgaagtcactcaagcaccaagcacagaacttatcagcatcatccaccggcaactttgccaccgtatagaaagctcccatcggaatcggggaatatacccccggaatacgatttaagccgtcgatcaaacatttacgccgttcgacatattcatcatacgtctcacgggcatattcttcggaagcatccagagaagcctcagcagcaatctggccgatcagaggcggactcagacgagcctggcaaaacttcataacggcattgcggacctctgcattcttcgtgatcaacgcaccaatacggataccacactccgaatagcgcttggaaactgaatcgatcagtacaacattttgctcaatcccttccaaatgacaagccgagatataaggcgaaccagtataaatgaactcacggtacacctcatccgagaaaagataaagatcatatttctttacaatatctcgtatctggttcatttcacggcgggaatataaatacccggtcggattattagggttacagatcaggatcgctttagtacgctcattgatcagctcttcgaacttctccacttttggtagggaaaaaccttcctcgatcgttgtcgtcaccgtacggatcaccgcccccgccgaaatggcaaaagccatatagttggcatatgcaggctctggcacgataatctcatcaccaggattcagacaactcaggaaagcgaacaatacggcttccgaaccacctgttgtaatgataatatcatccgccacgagatttatatcatacttcttataatatcctactaatttttcacgataactacgatatccctgactagggctgtattccaacaccgatcgatcgatcgtccggatcgcatccaatgccgcttgcggggtaggcaggtcaggctgaccgatattcaagtgatagacatgaacacctctctgtttggcagcatcagccaacggggcaagtttacgaattggggaagccggcatatcgactcctcgttgtgaaatattaggcattactattacggtttgtttttagaatgagacaaaggtatacattttagttgaaagttgaaagttgagagttgaaagttattttcgctatcaactctcaactttcaactctcaactttcaactttcaactcttcagattcccggacgcggcgaatccttacttgcatgcatagtcgagataaaggcattcggatcgatttccttcacttcatctttcaaacggggcaggtctttacgctcggcaatggtaaagatgatctctttttcctttccttcatacataccgcgaccatgcaagaaagtacctcgcatccccatctttcctacaatcagttcttttacctcctgcgttttctgcgatacgataaacaccgcccggtttggattctcggtctggaacatttccaccacctttccgaatacgaagatagcaaaccaagagtacagaggcaccgcccaatcttggaatacaagtaaccccaacatcaccacggtcgaatctatgacaataatcatattgcttaccttcaaatttgaatttagggcgatcacacgggccaacacatccgtaccggcgctcgtactttgcgcacggaacacacaagtcactccaagtcccaaaattgcaccaccgtaaaagcaagcaataaaactgtcattctcaaccaatggctgattagcaaacagatatgaaaaactatctgtaaaaatggatatcaagacaaaagtcacaattgttttcggccctgacgccaaaccgagttttttcatggccaaaagcaacaaaggcacattaaaacaaagagcagtcgcacccatcggcaatccttcgggcataaaagagaaaagcccctgcgtcacgtggtgcaaaacaatcgatataccatacacccctcccggtacgattttataaggtgcaagaaataagctgtaactaagtgcctgcaaaaaagcaccgataacgatcaaagtgtagtctgctacattttttttcagcgtggcattagaaaccagattaaacggttgttccatgtttgcgttgttgttcgattttttgtattgttcattatttgttaaaacagcgcaaagatatataaaaaaggagagattgtacacataaaacatacaatctctcctgctatcaaaaataacctagcccagattgaattatcagaaattcaaagtgcggttattattatttgtcacattcaacagaaccacatatttgcgatactgttcaggtgtaagaaccttcttcatcaacttcaaatttccataaacagcctgacgcatctttttgtcacgcattttttcacttgcccggagactttccccttgcatatccagaaaatactcattgatatttgctacttcattggcctgataagaggacaactgcaaatagttgctcaatttttcaaagttaatagcaaacggttctttactcacattgttacggttctcgcgtgcaaaacccattgttgcacataataaaacggctgcaacagccatacctaaacgtctcataatacctaaacattaaattgttaaacctaaacacaggggccatttgccccttttctttttaccttttatcttttcgttactgcaaatataacaatgtgttttataatattgttcttgaacatattcaaatattgttaacgattagcaaattggatactatttaacaattaagaaatctttttgaagctcaaatgaaacatttactacaaataagacaccatactccctatcaaacaaccgaatcgatagtgcacagatattaacatcagaaatttcgtcatgactacttacaaatcggacgacctttgatttacaaagccagtctgggttgggattccaattcaagcaagaactttttagccggaagcccgccgccgtaacctgtcaacgaacggtcactaccgatcacccgatggcaaggagcgaatatcgatatggagtttgcaccattggcattggcaaccgcacggactgctttggacataccgatacgctgggccatttcaccataagaaactgtctttccaaaaggtatttccagcaattcgttccatactgttttttgaaagtccgtaccaacaaagagaagcggcacatcaaactctttacgctttccggcaaaaaactcgtcgagttgccttgctgctttctcaattacttccgatgtacctacctcaaattcggaacacagcatccgtttcaatctccggtctacatgatcacgatgtttttctacctgccagtcacataaacaaagtttgtcaccaaacgaaccgagtagcaacaggccgcagggcgattcgtaacgctgtactttgataatatttttctctttcttcataataaacttatactaataatttatgcttctcatacgatggcctcacccaacgcagataaacaccaagcgaagccagacaacaaccggctcccactccataggccacagccaatccggcacaggaagcgataaaaccggccgaaagcatcccgataccgacacccaaatcaaaagaggtcagataagtagaagtcgccgttccacgcatattatgtggagcgacattgacaaagaggcattggaaagccggaacccctactccatacccgataccgatcatcaaggcgcagacaaagaaaacccaagactggtggacagttgcaaacacggtaaacgtcaccaacaagcagaccgcagaacagaccgatacccaatgaatcttcccatgatcgaccagcctaccggagaccagccgcgacgtccccactcctaccgccatataaataaagaaatagccaggattggccacttctatttcctttccgtacaaaacgacaaaagaagtaatcatcccataaggaattgcaaccaggatataagcgagcgcagccggcaatgccttcaccaggataaaacggtcgagggaaaaatgcggccgcggaaccttttctcgcttcggatagcggatcaggcagacagaaccgaccccgataaaagcagccatccaaccaataaagacaaccggattaaacccacctttcccatagatggcaacagctgccaacggagccaacgacatcgccaaattgattgtcagaccgtaaaaccccattccttcaccacgccgggaggaagggatcacatcaatcgcaatcgtattgccggcaaccgaagtcaaccccataaaaccaccctgaacgaaacggacagccataatagtcaacatggtcgtggcaatcagatacccgccgaacatgaaagcaaaaacgaagaaggcgaaaagatataaaggcttacgcgaaaagcaatccaccaaaaaacccgaaaaaggccggacacagagcagaccgattgtataactagacaacgcgatccccacatttgccgtactgatccccaaaacttccaccagatagaccggtatcgtcggcatcagcatatagaaagagaagttcatcaggaaataagaaatgcaacattgcacaaaattccgattccataatatgggtttacaatctttcattttattcacgccagttcactcaattccagccagcgcattgttttttcatctatttcttctatcacttttgcgattcgttcggatttagccaacagttcgtcattgctcaacgtaccgctgctcatggccgtttccaactctgctttttcggcttcaagcagaggaatctcgacctcgagcgcttcaaactccttgcgttccttgaaagtcagtttctttttctgcaccttttcaagacgcgacgttttctccacagtgggggccattcttgcctgtcgtgcagcttcagtctctttttccaactgatcctgcacctctttccactcgcgatattgcgtgtagttgcccggaaaatcctttatatcggcatttccccgaaacaccaacagatgatcgaccaccttatccataaaatagcggtcgtgcgacacgacgatcgcacatcctttgaagttccgcagatattcctccaatacattcagcgtgacgatatccaggtcgttcgtcggttcgtcgagcacaagaaagttcgggctacgcatcaagaccgtgcagagatataaacggcgtttttctcccccactcagcttgtaaacgtaattatgctgtttttccggagcgaaaaggaaatagttcaggaactgtgaaacacccatcttcttcccgtcaccgaggtcaacatattccgcgatattctggaccacatcgatcaccttcatctgctcgtcgaactggaggccgtcttggctgtaataaccgaaccggaccgtttctcctacgtcaaaacaaccgctgtcaggctccacttcccccatcagcatcttgataaaagtagattttcccgttccgttattcccgacaatccccatcttttcataacgggcgaatatatagttgaaatcttccacgatcttcagatcgccgaaacgtttcgaaacatgttccgcctcaaaaatcttcgatccgatatacgacgccttcacatccaagttgacattaccggcctcatgctgctgtttggctttcttttcaagctcgtagaaagcatcgatccggtacttcgcctttgtcccacgcgcctgcggctgacggcgcatccagtcgagctccttgcgaagcaagttactggcccggtccacctcggcattcaacgcgtccattcgttcttgtcgtttttccagataatagctgtaatttcctttatactgataaatctgtttccggtctatctcgataatctcactacagacacgatccagaaaataacggtcgtgcgtcaccatcaaaatactaatgttcgcgcgagaaagatatccttccagccattcggtcatttccaagtccaggtggttggttggctcgtcaaggatgatcaattcgggatcggtgatcaacacgtttgccaaagccacccttttcaactgcccgccggaaagcgtttccatcttctggtcgaagttatggattttcagctgtcccaaaatctgcttggtacgctgttcataatcccaggctttcaagttatccatcctaagcaggatatcttcgagattggaatgatcgccgcttgccatcgcctgctcatattcggcgatcaaacgcaccgtctcgttcggagagtagaaacacgcttgcaaaacagtcaggccgtccggataatgcggcatctgttccaggtagccaacccgcagatcatttcggaacacaaccgccccgctgtcataatcctcctttccggctataatatttagcaaagtcgttttccccgtaccattcttagctatcagcccgaccttctgcccttgcgcgattccgaaagtgatatcttcgaataaaaccaaatcgccgaagcttttagtcaacttatctatttgtaaataacttatcatatattcatatctgctttaaatgcaggacaaagatacaaaaagatcaagcacgatggatgggattatttcgtatattcatgccgaaacagttgcctgctgacaattgtcggcaaacaacaactacggcggaaaaatccaattatcagaagggaaaaccagattatccggcagacgattcaacaatatatgccaagctgttttaaacaatcctcttaacaaatatgttcccttttataataaattattatttttgccgctttagataaattttaacagatacactatgttgacaacaatgatcatcgtgttcctgataggatatttacttatcgctctggaacatccgctaaaaatcaataaagcgggaacagcactcctgactggaacaatcctttgggttttatatacattgggggcccctcaatttattccgaccgcttcagccgaagaatttaaactttttttagacgcattcccattcataaaggatctgccctatgcagaccagtgcatccgtttcgtcatcgaccatcagatactggatagtatcggtgagatcgcagagactttgatcttcctgatcggggcgatgatcaccgtagaactcgtcgattctcacggagggtttatgttcatcaccaaccgcatcaccaccaacagcaagcggaagttattgttcgtcattgctacgatcacctttttcatgtcggcagtcctggacaacctgactacttccatcgtcatggtcatgctgatccggaaattaatcggcaattataaagagcgttggattttcggtagcatcatcgtgattgccgccaacagtggcggggcctggtcacccatcggcgacgtgacaacgatcatgttgtgggtaagaggaaatatctcgacttcggcaacgatcccgcatctatttttaccgagcctcgtatcggcattagtcccggtattgatcatatcccgctatttgcacggcaaagttacgcctcccaacgcttttgaggaaaaccgtgacaaccttctattaaaagtattgaaagcgaacgaaaaactagcgatcctctgcatcggcgtgttctgtctgctgttcgtcccggtgtttaaaacgatcatgcacctgccccctttcatggggattttgatgggagtcggtatcctgtggatattcactgaattgatgtaccggaaaactccgatcaacgaggacctgaaactccgtttatcgaaagtagtgagccgtatagacggagctactctgatgttcttcctcggtatcttactggctgtggacgcactgcgttgcagtggtgttttaggcagtttttccctctggttggacgatacgatcggcaatgtatatgccgtcaacctgattatcggaacgctctccgccatcgtcgataacgttccgctcgtcgccggtgctatcggaatgtaccccgttgcctcggatgcgatggtcgctacggctgctgatccggcttatatagccaatttcgtacaagacggcgtgttctggcaattcctagcctattgtgccggcgtgggtggcagcatgctgatcatcggttctgctgccggagttgtcgttatgggactggaagggattaatttcatctggtatctaaaaagaatctcgttgctcgcactggccggctatctgtcgggagccgctgtttacatcctacaaaatgtactattaggcatataaaaagattcttattatatttgtcggcaataaatataaatatacacaatgaatttcatttccaaactattcaagaagaaagaagaagaaacagaagtcgtatcgaaaggctccgtagaggagttcgttacgctgatccgcgtgtattaccaggcggtaatggctgtgcagttaggtatcaccaacctcaatatattgaacgatatggcgttgttcaaacggatgcttaagatcccgactcagaacaacaagttgggcatagccgagaaatcccgttcccgcaaaatcctaatgcaggaatacgggctgaacgaaaacttcttcaaggaaatcgatgcctccatcaaaaagaactgcaagacgcagaacgacatcaaatcctatttcatcatgtatcagggattcaacaacgacctgttctccctgctcgacaacctgatgcaatggaaattccgcttctccatgctagtgaagaaactgttatattcgcagacacagaagaccatccatgagattgtaacccgttcggaatggaaagatgtcagcgttcagaaagttgcctggagaatacggaaatacaaagaaacgctcggctattcggaagaatggatgaccgacttcgtgtacaatgtcgtgctgatggccaaagaagatgccaaaagacagaagaaagaagacaaataacaccgtgactatatgagctacctgttcttagaatacccgaaatgcaacacctgccgaaatgcaaaaaaatggctggatgagcataaaataacgtacgaggatcgtcatatcatcgatcgcaatccttctgtcgaagaactgacagaatggatcaaacgcagcaagcttcctttgaaaaactttttcaacaccagcggactggtttataaggagatgaaattgaaggacaagctgcctgcgatgagcgaagcggaacagatcgctttgctggcttcggacggcaaattgatcaagcgccctttgctgatcagtgaaaatcaagttttggtcggtttcaaagcggacgaatggaacaacctggtaaaataatgaaaacgccagccactcagccgatagagcaacatccgttagggttcttcctcccggaaaacacgaaattattgatgctgggcagtttcccacctccgcgtgcacgctggtcgatgaatttctactatccgaatatccaaaacgacatgtggcggatactcggactggttttctataacgataaagaatatttcttagaaaccaaaaaagctttcagtgaagagaaagcaaaagccttctgccgggaaaaagggatcggaatcggtgatacggctatggaaatcatccgtttaaagaataatgcttccgacaacttcctgcaagtggtcacaccgttgaacccggttgaggttctggccaaaataccagaatgcgaagcaatcgtcgtaacaggtcaaaaggcaatggacacgcttatcgccacgctgcctccggttgaagaacccaaagtcggctcctactcccgtttcaccctgtcgagccgcattttccatctctaccgcatgccttcttcctcccgggcttaccccaagccgttagaggaaaaggccgcagtatataaacagatgttcgaggatttaaagatgatataaatcagtcactttcggcttgatcctaaagtaaccatcatccgcaatgaaaataccggtttaccagttcaagcattccttccggatcatttttcaggtcttcacgtaatgtcgtgtcgtcataactttccagtttttttatgataccgtcaatcatgctcggactaaagacattatgctgttcgaataccctcctctgctgttgcaggcgtttggcagaggcggcacagctatccggcaattggtccaatgtttccaaacgagccttgttttcttcctgatgaatattcacgttcacataagtcttttctgcaatatccaacgcatccgggatctcaaacccgtagcggcaagcgaccgccaatcccgccaacaactgatataaatcggccgatccgtccggcgaacgcatttcgaccgtctgcttctgcgtcgtgtcataatgactatctgcctccaacgggtttgccagcgaacacatatccttcttggcagcccaccccaacggaacacgcactaaaacagagcggttacggtcgccccagcaaatattcgtcggagcctcctggtgaggaaccagacggaaataagaagtcggattcgtattgccgaaagccgtaatggacggagctaacttcatcatgccggcaattgccttacgagccgtttccgacaaaacgccatcctgcaacatctgattcttgccatccttcataatacgcatatgtatatgcaagccggaacccgcttttccagccgtaatcttcggagcaaacgtaatgttcaacccgtactcgtatgccaaattacggatcacccatttggcgatcatcaactggtcggcggcatcttccacccgcgtaggcaggaattcaatctcattctgttcatatattttaccattcaaggtaaaattaccaacttccgaatgcccgtattttatctgtcctcccgcttgtgcaatatattgcatacattgcgtacggaactggttgaacttcgcataaggccccgattcatgatatccgcgttgatcagttgccgggaacaaatcttcctcatccgcaatcacataatactccagctctcccatcgcctcgaactgcatacctgtcacatccgaaaacgccttgcttgccttgtgcagcgtatattcaggcgagctttccaacggttcgccatccttattaaagaacgagcacagcatgctcaacgtcggcaattcggaaaaaggatcgataaacgccgtacggaaacgcggaatcacatacaagtcgctgctacccgcctcgataaacgaaaacaggctggaaccgtccacacgctccccgcaggtcaggattgcatccagatatgcagcattgttaataacaaaattcaatgttttcaagcgcccgtcacctgcaggatacataaagttcaccatccggatattcttctccttaatgtacgatacgatatccgcctttgtaaattcggcagatggcttctgaaggaactcaaccaaaaggttggcattcatgtctaattcgtctttcatgtctttgtcgattgtttgtataattatatacccgattaacaactctattacaccaaagataggaaagaaattccgggaatcaccaaagaatcgagaaaataagtggtttcatcaactatttttcgtacatatagttggaattatagaatattctcttacctttgcactcgcaaacacggaagtagctcagttggtagagcactggtctccaaaaccaggtgtcgggagttcgagcctctccttccgtgccaaaaggaaatcatttcgatttcaacaattccgcaatctgttccccaaacacaatattcaatatctgatcttttttatcgctgtccaattttatttgcagaacagcttcggtcgatgttccattccctttcgccataacatatttatcgggaaatgtaataacatctattacagacatctgcaaagcatttgcaatttgcaatagcgtattatatttcaattcgcgttcacccgacatgatcaagctaaatccagcctgcttcataccaatctgcatagcaagatattcctgcgaatagcctctatttcttcgaattgtatctatattctccaatatactgttcatactttcaaattaacaattgtctaagaagaaaataagcatacatcgtaatattttattgcgattatttttgcatatataacattttgcaatatctttgctgctgatacaatttaaaactattaacgaggattgtgtttacaaaactcattcttaaatcaatcaagagagttgttaacctataaagatataatcaaatgtgtaaatttttatctaaaatatatgttccacctaatacatgttgcctatgatctatcatctctaaattccgtttttttagctggatagcaatatccatattagttttttaaccttatattcatttaatatccaaacacatggaaagatattctttaaaccatttattcaggatgctcggctgttttatgctttgcatcatgtttacagcaacggcattcgcacaacaaaagactataaaaggaactgttgtggatgcgaccggtgagcccttaatcggtgtcaacgtatcagtaaaagggacaacaatcggtataatcaccgatattgacggcaattacacattggaagttccctccaaatcaactatcgtcttttcttacatcggctatcaaactcaagaggttgcagtaagtaaccaatcaacgatcaatgtaactttaaaagaagacactcaaaaactggaagaagtcgtagtagtcggctacggcacacaaaagaaagtgactgtaaccggttctgttgccagtgtatccggcgaagaactgaaagcctcaccgacaaccaaccttaccaacggcatggtaggccgtatgccaggtgttatcggttttcagacagctgatgaaccgggtggtggcggtaccacaattcgtatacgtggtacaaattctttaggcagtaatgacccattggttgtaatcgatggtgtgcccgaccgtgatggtggtatgaaccgattgaacccgactgaaattgaatcaatctccgtattgaaagacgcatctgccgccatctatggtgcacgtgcagcgaacggtgtaattttaattacaacaaaacgcggaaaagaaggtaaaccagttgtttcatttaacgcaagtgcaggtttctcacaaccaacccgtttacccaaaatgactaattcatacgaatatgcaaccatgttgaacgaagttcttccgggctctttctctgacgaacaactcgaaggtttccgcacacacgccaatccgtggaaatatccagacaccgactggtttgatgaaatcgtaaaaggcgcctctccgctatatcgtgcagacatcggcgtatctggtggtacagaaaaagtaaaatattacgcaaacttcggagctaatggtgaagacggtttgtacagaaattccgccaatcgatacgatcagtacagtctgcgtacgaacttggatgtcaagaccagtaagtatgttgatttccaattaggtgtaacagcccgcttggaggacactaaatatccggctaaaggagcaggtgatatttttggtgcagcccgtcgttctcgtcccgaccaggtagcatggtggccttcaggcgaaccgggacctgcagttgaacgcggtgacaacccggctgtaaccagcactgacttggcaggtttcgaccactataagaaccagtacatccaaaacaatttgtcagtcaatataaaagtaccttggatcgaaggtctaactttacgcggaaacggttcttacgacatccacttccaaaaccgccgtttgatgaaaaaaccggtgtacttgtacacatgggatggaacaactgaagggagcgaaggattgagtgcatccaaacaatggttggacactccacaattggaacgtaaacacagtgagcaaatcggttggatgctaaacggattaatcgactacaatcgtacattcggacaacacactataggtgttactttcggtatggaaggacagaaaaagcaatacgaagaaacatgggcattccgtcaaggtttcatctccgattccaaaccggaattgagtttagggggtgaagaaggacagtctgcaagaggttattcttggaaagaaacccgattgaactatttcggacgtgcttcttataactacttggaacgctacttattcgaatttgtttggcgtgtagatggttcttaccgtttcccgaaagagagccgctatggattcttccccggcgtttctttagcttggcgtgcttctgaagaaaattggtggaaagataatatccgctttatcgattacttcaaactgcgtggttcggtttctcagacaggtaacgatgcattggtagacggagatggcaactatgaccactccatccaatatctgactacttacgcattcaacaatgccggtactgtattcggtggccaggaaaacaaacgtctctatccgagccgtactcccaacccgaatatcacttgggaagtgggtacaacttacaatgtcggcttagacttcaaattcttgcagaatcgcctgagttgggaaacagacgttttctatcacaaacgaaccaacatgctgatctcccgtaatgcttctctgcctgaaatcaccggtatcacattacctcgtgaaaacctgggagaaatgaagaatagaggcttcgaatcattggtcagctggcaggataagatcggagaagtcgaatatggagcatctctgaacatgacgtatgcacgcaacgaaatcactttttgggatgaagtacaaaatgtgcccgaataccaattctcgaccggcagaccggtaggtagccgcaatatgttactctacgttgcagacggcattttccatacacaagcagaaattgatgaagcacgtgcaaaagggttattatattcagacaacaccgttccgggtgacatccgttttaaagatatgaatggtgacggtaaaatagatggtttggaccgtatccgcccggaaaagaaccaggaacctcgtttcgttgccggtctgaccctgacagccaagtggaaaggcttcgatttgatgatgttatggcagggagcaaccggggctgaagtgtatatcgaaacatggtcaggcttagttggtaacttcttgaagagcgactacgacaaacgttggacaccggaaaatccgtattcggaaggaccgcgtacatgggaccgtgaaaaccagtattggatcaacaacgacaatacctatttcatgagaaatgccaactacctacgtctgaaaaatattgaattgggttatacattcaatttcgaaggattgaaaaaagcgggcatttccaatttgcgtctttacaccaacgggaccaacttgattaccatcgacggtgttaaagatgcagacccagaacagcgtgacgccagtttaggaggctatcctttgagaaaaatcatcaacttcggagttcaagcaacattttaaaaggtaattattatgaaaacaaaattgaaatatatctgcctttcggcagcagcgggactgacactttcacttagttcttgttccgacttcatggacctcacacctgaagaccagtatgacgaaacaacagtctggtcggatgcagatttagcaaaaacggttgtcaacgatgtctattcatacgtatgcgacatagcacaagaagtaaatccagacgcctggacagatgatgctttctttacgcacgtatacggatgccgtgatatcaacgaagcgaccgtctcaccgagcaacttgggcgcttacgaccgtgacgactgcccgttcaaatggagcaagcaatacaaagggatctatcgtgccaatctggttttggcaaatatcgacaacgttcctgaaaagaccggtgtagacttgaatatattgaaaggagaaacttatttccttcgggcatatatctacactgagttgctccgtggtttcggtggcgtacccatcgtagacaaagtgtatagcattgaagaagcttcggccttaaatttaccacgtgccaatgttgcggatgtaatggattttattctgaaagacatcgaacaagctaccaacctattacctgaacaacaaatcggtgtcaatttaggtcgtgctaccaaaggagcagctaaagcattaaaagcacgtctgttactgcatgtagccagcccattgtttgctgatcgtaccgtcaataaattagagtgtaaccaatatacaggtgaccgtcaagcattatatcaacaagcattagatgccgctaaagatgttatcaatgacagcaattactctttgattgactgtaatgccggtaccatcaaggaaattgcagaaaaattccataacatcattatcacgaacaacgaagagactatctggtcgaaacagtatgtaaacaaagatttgaatgccgacaactgggttcgtaaccgtgtagccctattgcatgggccgaacggttatcacaactgggccggaacagctccgacacatgacttggtgatggctttcgaaacagaagaaggtaaaatcccgaatacgctattgaaaccgggtgaatcaaccaccgaaaatccgtatatgaaccgtgaaccacgtttctatgcaactatcggttatgatggtgcagagtggggacgccccagagcttccgatggagccgtgttcgatgcgactccactgggtaacctgcaattcggttattatgaattaagtgaaggcggcaataacgtcaatgccatatattcagttgatgacgataacaatcccatcaagcaggaaaaattcaatggtatggtcggcgttgatacccgtatgggacagatcgaaaactggaatggtacttacaccggctatttggaaaagaaattgatcgacggttctgtagcagccaacgaacacaacttccaaacttgtccgatgccttacatccgcttagccgaaatgtatctgattgcagccgaagcctgtatcgaattaaacaaattggatgaagcagtcatttatatagacgctatccgtggacgtatcggtcggccggataccaaagccacattggctgttcgcggacaaacattcaaccaaagtgatctgcgtgaattcctgcgccatgaacgtcgtgtcgaattaacttatgaacattcacgttattatgacatacgtcgctggatgattgcaccggaaatcggaaacaagaaattaaccggtgtatcaattgtcggccgtttaaaaccgggcaagacagcatctttaccgtatgttcatgacgaagaagtctataattacacctggacagttctcaatctgaactatattgagaaacgcaaatgggacaacaagatgtatttcgcccctatcaagttagaagaaacattacgtaatccggcgatcatacagaatccgtattacgaataatacctgtttccaaacaaatcagaatagggaggaagttttttacttcctccctattttttcttgtgcatattttgtaatatcactctatcactttttcatgatatcatattaattatcaaccgataaagaagtgatacatgcccttttttatgtatcacatccctatcaccatccatcacttgtctcgtcctgaaataggttgactgtgtattaaaaaaatcctgttataggttgtctataaatgtaaaaaaacagacaatcctttcttaatcctaaaataagttaccttatcctgtttcactacaggacagggggcttttcacagccaaactcatcggccggggagcgcccaagcggcaaggggcagggccacctgtcccgacgagcgtttccggtctctgttctattttgttgcaaatatatcagtttaatcctgttcataaaagaatagcttgtttacgtttataaatagttttccattttctttttaaaggccccttcttcgcatgcgcctcttcaggtgtcaacatttccacactactgtgagggcgccgggtgttataaatatcgatcactttcctcactatatcccgagcctggccgagcgttgttatcatttctttattcaaccattcttcttttaatattccattgacacgttcagctattgcattctctctgggatctccgttttctgtcatacttatacgacatttaatgccttgtaaaattgagatataatctttgctacaatattgtactcctctatccgaatgatggatcagatcgcttcccgggggaagtgtttccaaggccatattcaacgcttttatcggaccggacatctccagggaatcctccagggcccaaccgacaatcttacgggagtatgcatctgtgagcaaactcaaataatagaatcttccttcgacattgcggacataagtgatatcagctacatataactgattggctgatagtggatcataatcttttatcagatttggatacttatgaaaacggttccatgacagagttgttaccggccgataaaccctggaatgtctgatcaacaaaccattgtcgcgtagcaagtcaaaaaacttatcgcgccctatatccaaatcaggatgtatcttggtttttaggatatgatacaacttacgaccacctaaaaccggttggtcctgacgcaggctgtttaccattttaaggattatttcatcacacaacaattccgattgtaactgtttttctctcttataataggcttgcttgctatacccaaacaacgaacaacaatcagggatacttatttccggctgattgtcatgaagccttttcactgcttggtgccagagttttttcggatatcgatgttatagtgttcattggctagttctattaggatttccatcgcacggcgatgagcttgctcatgcttcagtttgtctcgtcctgaaataggttgactgtgtattaaaacaagtctcatttatttttaaaaaaccattgattttcttgcatttcctctatatttttattatctttgtaaggacttaaagtcatatacatccggatgtttccaacccctacacccccatgtacagactgccgtcacccgggtgttcagaaatgtaaatccgggtgtaaagaaagttaattaggcacttctctcagttttattcattggttttatcaaaaatacagcttatgtcacacgcttatgtagtacgtcccaaagtggacaaaagcggagaaacagaaaaaatccgctattatggtgtcccggtaacatccgggcaagtatcgaccgaacaactggctacatgtatctctacccggtgcacgctttcaagaggcgaaatactggcggccataatcgaaatcggacgcgaaatccagttccagctggatatggggtacaccataaaccttcacggcataggaacattgttcctctcggccggaagtgaaggatatgaaaacccgaaagactgcacgcctcatcgcgtgaaagctaaacggctatgcatcaaggctgatccggaaatgaagaagttcatgaaaagactcaagtttgaaaggtggaaatgatttgcaagtagaaattcatgataaaaaacaatcaaagatgaaggtaacgttatatcgatatgaaaaggagacgctcgtcatgcgttccgttgaaatggaaaaactgcaggctgccctacgaacagagaatctcaacaaaccggtcagcaccacacgcgacaaagccatgtttgcactgcccggcacgcaaaacagctacatacagaaacttccggtggtcgttttcggagggactttccgcaagacaggcgaacccgcccctcccatgcgcgactattcgggattggtgctgctcgaagtaaaccatctttccgacttgcaagaagcggtacaaatccggcaacaagccgccatgatgccgcaaacgctactggcattcgtcggctttagcgggaaaagcgtgaaaatagtgatcccgttcacactgccggacgggacgcttccacgctcacccgaacaggtcaaacgattccactcgcaagcctacttgacggcagttaaatactaccagccacaattaggacgtaacatcacactgaaagaaccggtcctacagcacggatgccgcatgagctacgatccgcagccggtatacaaccccgatgccgtcgccatccggatcgagcaaccgatgcggatggcggattcggaagagatccgtatcgtcccggaagaaccatccgaaccacttcaaaggctaatgcccggtatgtcacgcaactatcggatcgctacactgttcagcatagcgatggtagacgccatccgaaaatcaggacagataaaagacggggatctcaagccggtctttaccctattagccgataattgcctgaaagccggtatcccggaagaggatgccgtacaatgcacactactttacaacgatctgagatccaaagagatggaaatccgcatgactttccgatccgtctacacactgaaagaagcgctcgccggaaaaacattcatgcctgaaatcatgtcgctgactttgcaattagaagaattcatgctgcgccgttacgaaatcagaaacaacaagatgagtggcgaagtggaataccgggacaaatcgctcctacgtttcacattcagccctttcacccgcgaagtccgcaactccatctgtacggaagcgcacaaagaagggttgaacgtctgggataaagacatcgaacgatatgtttactcggacaacatacccacttttttcccgatagaagaatatctcggacatctgcccaaatgggatggcaaagatcatatccggaagcttgccaaacgcgtaccttgcaacaatatccgatgggcagaccacttccacagatggttcctcagtatggtagcgcactggttagggttggaccgggaacatggcaacagcactactcccctactggtcggcgaccagggatgcggcaaatcgacttattgcctgaacatcctgcctcccgaactgcggcagttctacacagacagcatcgatttcagcaagcgccgggatacggagttggctttgcaccgctatgccctggtaaacatagacgagttcgattccgtcaaggatacacaccaaagttacctgaagcatatcctgcaaaaagcgaatgtcagtacacggctgccctatcagacggccaacaggaatttaagacgttacgccacattcatcgcgacaagcaacaacttcaatatcctgaccgacccgaccggtagccgacgtttcatttgcatcgaagtcacagacaccatcgattatatacaaccgatcgactacgagcagctgtatgcacaggcgatggaagcattggccaacggcgaacgctactggttcacacacgaggaagaaaccgaaatagtcgccaacaaccggcagttccagcaaataccgcccgaagaacaactgttcctgcaatatttccgactcccgaaaaagaatgaggtaggcgaatttcttctgtcgatagagattttagggcggatcaagcagaaacaacgtgatttcagctacacaaaaaccgtcatttccaacttcggacgtcttttgaagcgaaacggcattccttcgaaaagaagcaacagaggcactatatatcaggtagttgagctaagcaagtcctaaaaaagacttttcttcttcaaaaaacagtgacacatgagtggtaatcgtctccgcgatgctacctttgccatttatgggggagtaaatttcttatagtctcgtgatctgtattgggatttatatcaatgagcttagtaagcaaatctttaaaatactcaaatgagttaatgttgttgagcctgcacgaacaagccagtgagtagatcagtgcagcccttttagccccctgatgactcccacagaataaggagtttctgcggcttaagctaatatatcgcattagtctttcaatcgcattattgtccggagcatagtctgcactgcggatataattgcataaagcatcatattcgtttaacgtatagttaatcgccttacttaattcacttttgggtaaagtcgactttttgttttttatatttatcagttcctcttttaattctttgaggatagggggagcatatttatttctatagtccagtatctggcgggctgtccagtccgggggaatgcggtgctcattttggtaaaggcgattgatgattcgtacgattttttcagcatccttgtttcctgttatattcaggaacttgcgtttgcaatgttggaaacaggataggcggatggcatccggataggcctctttttctattatcttgtaatttcctaatccgtcactttgtatagctccccggtagtcttccctgagataaccggtcaggacctttctggaacgtgaaccgttttcgtaaaagaaatgtaccagttttagatgattagccagtgctgcccaaatatatcctttggctgtggatttgccggatgagttgtttgtatcactggtaagaacggtataatagctctcgtccatactcagataattgtccgagaggacagtctctttgagaacatcttcaaccaggtcaaacagaccggccgcttttttaatcagtccatgagccgtggctttattcatctcaaagccatgctctgcgaagagtttgatgatacgttcgactggcatggagtagatatagcgcaactgcaggataccggcgatgaaggatgcatcataattagagttcaacaaggggacagctggcagacttccggcataaacagtgcctttacaggcataatagtgctggtgatagatatgcttgataaaacggggaggaataaattcgtagcggatgcaatctgtcgtacgtatttttttgccttcttccactttgaactctgctgcatccggatagatatcatgatggcaggtttccagattaaaatattctttgcgtctggctccgttgttccctctttctttcagattgggttttactttggctatgattgtcgttcctttatcggggacagagacctgttcggatttcttgcccgataccatctttcccaatatgcggactttactttgccggccttcaagggatgcattcttttccaacagggctttctccaacgagaggatggaactgtttaaggatttgacttccgcagtcaggatattgagctgttcattctgatctgcgatcactttcaacaactcctcttcccgctgcgcagccaatttcaactggtcttccaataagagggcaatccgcttgtaatccatgccttaaagatacggatagttcttccggcggcaaaatatttatgcttttatttataaagcggcgccctacaaatcaatagaccggactacaaacgaaggcgtttcctgtacttcactgaattcagagagatgcctgacatgatcatcatgaacgttttccattcgatcttattccagtcctcacggggattaaaacgggggagttcaaaggtcccgtcctctaaacgcttctgatataaaataaatccgtcttcctgccagcgcaacagtttgatcatgtcccgttttttaccacagaacaaatagacatctccgctgagtgggtttcctgtctttgtattgcgaaccagttcggataaaatctctattccacaccccatattgatatagtaagggtaaagataataatgcagggattcgttcagactaaacatttggattgcctgttacttgggtgtataattcaaaaagcttcattaaggccgaaggggtggtctcgcggatactaatggatacaccgtcagggaaagagaggatcgcacctttgatatattggtccaaaggaatattgcgtgaggatatgcaggagttcttgatcggaaagctttgccctgacacttctataagtgaacttttcaagttactgtcattaccgtttttttccaataatacttccaaacgtaaacttcctacgcttcgattatgacgatgcatccattgcatcactcctttataacgtaccccttgtttacggcaaaaggtttgaaaactgtcgtaatgagggcgatcttcatgcaaatgtgccttgtaggcttctactgtacggggaaaacgagtttctgctttcatctttttttgatgacaaagctaaatactcttgtttgaagaacaatggtagcatcgcggagacgcttaccatgagtgatatgagcgtgatagatattccaagcaccaattgcacatcatcatgctaatatacagtcaattaaaaacaaaaagtgatacagtgatattgattttcggaatcaagttttttttgtatatgacatatacacttcgcataacaaattatttattgcaaaacacattgcacttattacaacattttgtaactttgggcaatatctcaattcaccgaattgctaatttaataatatcatgaagaacagaaaattaagaatgggaatggttggaggaggtagtgacgccttcatcggggcgatccaccgtcgcgcagcctttatggacaatcagatcgaattagtttgcggatgtttcagcgtagaccctgagatatccaaaagctccggtttatcgtactttttgccggaagaccggatttacagcacttaccaagaaatgttcgaacacgaaatgaccttaccggaaggagaaaggatggattttgtcacgatcgtgactcccaaccgttggcatttcgaaccagccatgatggcccttgaaagaggtttccatgtggttgtggataaaccgatgacattctcgctcgaagaggccaaacaactacagaaaaaagtggaagaaaccggactcgtgctggctctgacacatgtatactcggcctatccggcagtaaaagaggcgaaagcccgtatcgcgaaaggcgaactcgggaaattgcgtcgcgtctatgtagaatatacgcaaggatggctttccgaacgtatcgaattgctaggtggcaacaatgccggatggcgcacggacccgaaacgttccggcaaagccggttgtataggggatatcggaacacatgcctggcatttgagcgaatatattaccggactgaaagtcaaagaactatgtgccgacctgaaggcattcgttcccggacgtccgatcgatgacgacggggcggcattccttcgctacgaaaacgatgtgacaggcgtcttgaccgcaacacagatcggaactggcgaagccaataatatccgcatccgtatttatggtgaaaaaggtggactggaatggcgccagatggagccgaacacgctgacattgagatggagagatcgtccgactgaaatattggatatcggcaacaacggctacctgacccccgaagccctgtggaatacccgaactccggcaggacacccggaaggttttatcgaagcttttgccaatatctaccacaatttctcacttaccgtcagagctatcaaaaacggagaaacacccagtggagactgcttggatttcccgaccgtatacgatggcgtaagaggtatgcaattcattgaaacaatggtggaagccggatataacgataatgtaaaatggcaaaaatggattgattgaaatcctgaaaaaccgtaaataaataacatcttatgaaactaaacgtacttgcttgctgcctgtccctgctcgggacggcagctttcgctcaaaaaaacgagtggagagatcctaacgtaaacgagatcaacagagctcccatgcacaccaactatttcgcatacgaagacgaaaacagtgcattgaaaggatgtaaggaatcatccgggaattttatgaccttgaacggtaactggaaattcttctgggtaaaaaatgcagatatgcgcccgacagatttttaccaggtgaacttcaacgacaagggatgggataatctgaaagtacccggcttgtgggaactgaacggttatggcgacccgatctatgtgaatgtcgggtatccttggagaagccagttcaagaacaacccgcctgaagttcctacggaaaacaaccacgtaggttcttaccgtaaagagatcatggttccggcagactggaaagggaaagagatattcgctcatttcggttctgtcacatcaaacatgtatctttgggtgaacggacaattcgtcggctacagtgaagacagcaaacttgaagccgaattcaatctgaccaaatacctgaaaccagggaaaaacctgatcgcattccaggtgttccgctggtgcgacgggacttatctggaagaccaggatttcctccgcctctccggagtaggccgcgactgctacctctatgcccgcactccgaaatacattcaggacatccgcgtgactccggatttggatgcacaatataaagacggtactttaaatgtttccctgaacctgaaaggcagcgggacagtcgacctgaaactgttagataaggccggcaaagaagtcgctacttcgtcggtcaaaggttcgggcaaagtttccaccgacatggcaataagcaatcctgagaaatggactgccgaaactccggttctctacacactgatcgccactttgaaaaacggcagcaacacgactgaggttattccggtgaaagtcggtttccgcaagatcgaattgaaaaacgcccagatattggtaaacggacaaccagtcttgttcaagggagccgaccggcacgaaatggatccggacggaggttacgtcgtatcgccggagcgcatgatccaggacatcaaggtcatgaaggaatacaacatcaatgccgtacgtacttgtcattatccagacaacaatttatggtatgacctctgcgacaaatatggtatttatgtcgttgctgaagcaaatgtagaatcgcacggtatgggatacggtgacaagacgttggctaaaaacccgctgttcgccaaagcacatatggaacgcaaccagcgcaacgtccagcgtggctataatcacccgtccatcattttctggtcattaggcaacgaggccggcatgggcccaaacttcgaagcttgttatacctggatcaagaacgaagacaaatcacgtgccgtgcaatacgaacaggcacggacaagcgaattcaccgatatctattgcccgatgtaccgcgactataaaggtagtgaagaatattgcaagggagacatcgacaaaccgcttatccaatgcgaatatgcgcacgcgatgggcaactctcaagggggattcaaagaatattgggatctgatccgcaaatatccgaaataccaaggtggctttatctgggatttcgttgatcagtctttgcgttggaaaacaaaagacggcgttcctttctatgcttatggcggcgactggaacaaatatgacgcttccgacaacaactttatggacaacggcttgataagcccggaccgcaaaccgaatccgcatatgcacgaagtcgggcatatctaccagtccatctgggtgactccatccgacttggctaacggtgtcgtaaacgtatacaacgaaaacttcttccgtaacctggacggttactatgcagaatgggaattgctggctaacggcgaagtggttcagacaggcatagtcaaagacctggaagtagctccgcaacagaccaagtccataaaactgaattatagcacagagggtatttgcaaatgcaaagaactcttgctgaatgtggcctttaagttgaaaaaagcggaaacattgctgcctgccggttatacggtagccaaaaatcagttgacgatccgcccgtacaatgctccgaaactggatttgcagaatgtacaccaagtgaacattgagactgtcattccgaccattaaagataatgacatcaattatctgatcgtcgaaggagagaatttccgcatggacttcgataagcatgacggtttcttgtgcagatacgatgtaaatggcatgacgatgctgaaagaagacggaaaactgactccgaacttctggcgtgctccgaccgacaacgatatgggagccaacctgcaaaacaaatatgccgcctggaaagaaccgggattgaaactggtttctctgacaaacaaaatcgaaaacgacatggctactgtcaatgccgaatacacgatggatgcagtaaaagccaaattgtatctgacttatacgatcaacaacgaaggcgcagtgaaagtcacacagaaaatggtagccgacaaatcggctgaagtttccgatatgttccgcttcggcatgcagatgcagatgcctaaatgcttggatcagatcaactattacggcagaggtccgatcgagaactattccgaccgtaacaacgtcaccgacctgggtaattacagacagactgtagacgaacagttctactcttatatccgcccgcaggaaacagggaccaaaacggatatccgttggtggaaacagaccaacaaaggcggtaacggactcatgttcatttcggaagctccgttctcggcttcagccttgaattattcgatcgaatcacttgacgacggagtacagaaagaccagagacactccgaacttgtacctcaggcaaactacaccaatatgtgtattgacaaggtacaaatgggattgggttgcgtcaacagctggggagcgcttccactggaacaataccgtatccattacggagattatgaattctctttcatcatgaaaccgattcaatctaatttataaacagcaataaatgaagggagctgtccccgcatttccattcaagaagcggggacaagttcctatttttacaaaaattggtaaaaaagcataatcactatgcatatttcgttaaatagtgggtgcaaacttttattttatgtagaaaaagactacttttattgccgatttttaaatctaattcaggactaattgtaaaatcgtttaccataaaaacaaatggctactaacaacaattctaatcgctatccttccgaaaaagggagatttttcaaaggaaaaaccttcattcttttggtcggattacttctcggggcaggcattatggttgccgtatataaaacatccgtttatttttcttccgatgaatcctgtatgatgtgccatgttcatcctcatgcggaagacagctggaagctctccaaacacgtaaataacggaagcggcgttaaaacacattgcgtggcttgtcaccttccgcctcaaagcgacacctggaatcattatacggctaaagccaaattgggattgaaagacgtatggtccttcatgacaaaagacagtgcggatttcgactggaacaccaagtcggaactggaacatgccgtcaaatatattccgaacgaatcctgcaaggaatgccatcagaacttgttcccggaagggattaaccaggacggcattaccgctcacctttattatgacgaaaacgaaaagaaactggatttacagtgtatcagctgccacctcgacgccggacactataatccggattataaacacggcaaattaacaggtattcccggagccgccacggctactgttgataccagcctttatttcaagacggcgacacctgtcacatcttttaccgattatacggaacaaattccgggtacggccgttgcattcaaaatggtcgccattccgggcggtacattcaaaatgggtagcaccgataaagaaccgttccataaggcagatgaagctccggttcgaaacgttacggtcagtccgttctttatggctgaagtagaagtgacgtgggatcagtattgggcattctacggacaaaccatgagcgaaggacgtactccgcccgaaaccgtatatgcaaataacagcaatccggatgtcgatgccatttccggcccgactcctccgttcggattccccgaccagggatggggcgcaggtgaccgtccggctatcacgatgacacactatgctgcagaaacattctgccagtggctgtccaaacaaacagggaaaaaataccgcctgccgaccgaggcagaatgggaatatgcagcccgtggaggaacggaaactccttatttcttcaccgggaacccgaaagatttttcagaccagggattttggcgtaagttcttcgatgcaaaaacagacagcatcagttcattcgtgatttacgcgaagaacagcaaaaacagaactcaagagccgggcgaagtgaaagcgaacccgttcggtttgaagaatatgttgggtaatgtaatggaatattgtgccgacaaatatgatccgaaggcttacagcaaagggggcgataacgtgaccaacccgttaatcacagaaggagaagaatgggttgtacgcggcggtaactacacttccgatgcggcagacgttcgttctgcagcccgcgattatacaaagcatgatgcctggttgaagactgatccgcaacaaccgaagagtatctggtggtattcggatatccgcggtatcggtttccgtgtggtttgcgaaccggacccggcaattggagcgaaataacagatgtttaattgatacctaaaaattactatatcatgaagaaagaaaacagtattagcagaagatcgtttttaaaaagtacagctatggccggagcactgggtgcaatcggtacaggtagtgcaagtgtattaacctcatgtgcaggcggcggcgaaagtgcagctgcaaacaaacctctgaaagaacctggaacttattatattccggaattgccagataaggctactgacggaaaagaactgaaagccggtgttatcggttgtggcggacgcggttccggtgcagcagaaaacttcttggatgctgcaaacggcgtgacagtcgttgccgttgccgatacattcaaagaacgtgtagacgctttggccgacaagctgaaagaaaaaggatgtaatattcctgaagacaaacgtttcgttggtctggatgcatacaaacaattgatcgatagcggtgtcgatgttgtcattattgcaactcctcccgtattccgtccggtacatttccaatatgcggttgaaaaaggcaaacattgtttcctggaaaaaccgatttgtgtcgacccggtaggctatcgtacgattatggcaaccgccaaacaggctcaggcaaagaatctatgtgtcgtaacaggtacacagcgtcatcaccagcgcaactatgtcgaatcttacaagaagatcatggaaggtgctatcggtgaaattacgggtggtgtagtttactggaatcagagcatgttgtggttccgcgaacgtcagaaagactggaacgattgcgaatacatgatcaaggactgggtaaactggaaatggttatccggagaccatatcgtggaacagcatgtgcacaacatcgatgtattcacatggttcagcggcttgaaaccggttaaagctgtcggtttcggttctcgccaacgccgtatcacgggcgaccagtatgataacttcagcatcgatttcacaatggaaaacggcatccacttgcatagtatgtgccgccagattgatggttgtgccactaacgtcagcgaatttatccaaggaacaaaaggttcttggaacagtgctgaaatggaaatcaaggacaatgcaggtaacgtcatctggaaatacgatggtgaagcagaaaagaacgcacatacacagacaaatccatatgtattggaacatgtaaactgggtaaactgcatccgtggcggcaaacctatcgaacaggcttcagaaacagctgttgccaacatggctgctatcatgggacgtgaatcagcatacaccggtgcagaaacgacatgggatgcaatgactgcttctcctctggattatactccgaaagacctgaacttaggcaagatggatatgagtggatttacagttccggttccaggaaaacctcgtgatgaaaagaaaaaataaaatatggcactgaacagaagaaactttttaagagcaactctggcaggcgcggctgttgcagccggtagttcagcttttgctgcctgtggcggcaaggctgcttctacagaaggttgtccggcagaaaagggatcatgtccaaacagcaaagccgagttgaagatatcctttcaggaagggattgcaccgggagctaatctcaacgagaaatttgacttgatggaaaagttaggtgtcgttggtttcgaaccgggcggacgtggcctgaaagatcgtgtaaaagagatcaaggaagcactaaacggacgcaacatcaaagtgagcgccatctgtgctggtttccaggggttcatcctctcgacagatccggctatccgcaaacagtgcatggatacgatgaaagagatcattgctcctgctggcgaactgggttctacgggtgtgatcatcgtcccggctttcaacggtcaaaaaccggctatgcctcatacgcaggaaacgcgggatttcttatgcgaacaattcaatgaaatgggtaacttcgcaaaagagcacgggactacagttatctttgaaccgctcaacaggaaagaagcattctatcttcgtcaggtagcggatgcagcttccatctgccgcgacatcaacaatccgggtgtacgctgtatgggtgacttctggcacatgacttgggaagagacttccgacatgggagctttcctttctgcaggcgaatatctgcaacacgtgcacgttgccagccgtaaacgccgcagcatgccgggtgaagacggagaagcagataactacgttaacggcttcaaaggtctgaagatgttggattacgacaaatatgtaagtttcgaatgcggatgccagggagaccggaacgttttggtccctgccgcagtggaactattacgaaaacaatgggaagaagcataaaatatgccattagtatatcctaatatgcaaatgagtgaggtggtggaagagcacccctcactcattcctgtcattaaccgttttggaatccgcctgggcttaggcgacaaatcggtaaaggcgatttgtgaagaataccggctggataccgacttcctcttgacggtaatcaacacgtttctcaacgaggaatacttcccggaaaagaagctacaaactttccatacttcacagattatcgattatctgaccaaaaccaaccagtattaccaacgctaccaaatcccgaatatagaaaggcatctcggttcattcatatcgatgagtacgccgggaaacaacacgctcaacctgatcgggaagtttttctcatccttcaaagaagagctgacctcacggatcgaaaaggacgaccgggtctggttcccctattgcctgtcattaagcgaaaaactgaaagattatccatcttccgggcaggtcgaagcattgcacctcggaacggaacagcgattggaagatccgatagaggccttgttggcggatctgaaaagcatcatggtcaagcatctttccggcgactataacgagaacttatgctacgccgtcatatttgccatcagcagtttggaaaaagatatcaaacaacacaaccgcatccgctaccggatattgacaccgatggtttcggctatggaaaagttgtgtatttaacaaacagccggatgcatcgcaacaagcaaatagcaatcatattacccgacacgctacaaagcatcggcctgcaaagcatgctgatcgactattttccaccggtagagatcagccactaccctacgttcgaggcattttcgacttccggcaacgatacgttcgactactactttacaaatgccgctttatttgtcctttatgcagactttttccttccccgccggagcaagacgatggtcctgatcgacggaaccgaaggcgaagggggactatcggcaaccagccatatcacgatcaaggcctcgcaggaagtcatcatcgagcagttggaacaactttttaccggagaaaacaacagtatttccagcgacaacaacaaggaactgtccacccgcgaaacggacgtcctccaattaatcgtcaaaggcagcaccaacaaagaaattgcagacaagctgaacatcagcctgaacacagtcctcagccaccgcaagaacatcacgaccaagctcggcatcaaaacagtatcgggacttaccttctatgccatcatgaacggcattatttcaggcgacgacatcgaactttaaaatcactacatgtagtgattgattcccattcatctttaccgttcctttgcaaccgtaaaatactaatagtttacaattaatacgatgaatcaacgctatctgtatatccttgtcgcaggcgcgcttacgtgtttgcaaccgattaaagccgaacgggtgaatgaaaatgtgaacgacacgatcaagacctataatataggtgaggtgatcgtcacttcttccacaaaggagacgaacgatctccgcacgcttccgggagccgtttccatcctctcgccccaagcgatagcaaccaggcagatagatgctctcaaggatatcagcgctttcgtccccaacctttatatgccggactacggttcgaaaatgacttcggccatttatatacgcggaatcggagcgcgtagcagcgggcaatccatcggattatatgtcgacaacgtcccctatctggataaaagcgctttcgatttcgagctgaacgatatccaacgcatcgaagttttacggggaccgcagggaaccctttacggacgtaacgcaatggggggcatcgtcaatatctacaccctctcccccttcgatttccaggggacaaaagtcacgatgtcgatgggcaattacggggcggccaaagccaaagtgtcccaatacagcaagatcggagaaaacatcgggatctcgttaaacgggtattacgaccgtaacgacggctttttcatcaacgaatataacggcacaaaggccgataaggaggaatcggcaggcggccgattcaaattagaggggtatattacggaccatctgaaggcgcaatatacattcaactatgactatgtaacgcaaaaagccttcccctacgggcagtacgacccgcagactggggctgtgcagccgatccgcatcaacgatccgagttcctactggcgccgtacgctgaacaacagcctgtatctggaatggaaaacagaccgttttatcctctcttccaccacggcctaccaatatctgaaagacgacatgaagatggaccaggactatacggaacagtctgttttcacccttcaccaaaagcagaaacaatatgcctggagcgaagaactggcgatcaaatccaatacaaaaagcaattaccaatggagcttcggcgcctacggtttttataacagcctgaacacggacggccctgtgatcttcaagaaagacgggctgacgggcattctgcaaaaagcattcgacgacatactggcgaataacccaaaagcaccgaagcttactgtccagggggacgaactgaaccagatttatttccccggaaacttcgacacaccgacctacggcttcgcggctttccaccaatcgacctacaataacctctttgtcgaagggctttccatcaccgccggtatccgcctggattacgagaaagcgaacctggactatcattcagcagtagacagcatgaagatcggtgtggaaatgggcccgatgaaaatgacgctaccagtcacgacgactatggacggcaacatctcacaggatttcctgcaagtattgccgaaggtttcgctccgttaccagtgcacacccgaaacattcacgtatctctcggtcgccaaaggatacaagacaggaggttataacgtgcagatgttcggcgacctggtccaggcacaagccaaatacgacctgatgtcgaagttcgcacccgataaggccgaacagccgggcgaagtgaaagacatcgcttcctacaaaccggaacacagctggaactacgaagcaggcatccgcagcgaactggtccggggcaggctgagtgcggaactgaccttcttctacatggacatccgcgacctccaactcaccagctttgccgagaacggcagcgggcgcatgatcaccaacggaggaaaggcgaacagctacggcgtggaactgagcctgcgcagccgtatcacggacggactcaccgcagacctcaactacggttttacccgtgccactttccgcgattacatcttcacggacaaggacgagaacagccagatcgtgaaaacggactgcaaggataatttcattccttacacgccgcgccacaccgtcagtctgggattgcaatacacgaaactactccaccggaaaatggtcgaccagtttaccgcatccgcccagttcaccggggcaggcaagattttctggacggagaagaacgacatcagccagccgttctacggcctcgtcaatgccaaagtgggcgtccgcaagggaatcgtcaacctcaacctgtggagccgtaacatcacgaacacggactaccaggcgttctatttcgaatcgttcaaccagtcgttcatccagaaaggcaaaccgttccagatcggcggcgaaatcaccgttacattttaagacatgaaactattatactacctcccgatgctgctttgcctcgcctatacggcaagaggggaagagatagaaaaagatacggcgaagatccgcaatgtcgaactgaacgaagtagtcgtgcagtcgttcaagcaacagcgcgacctccggctggaacccctgtcggcatcggccgtgacggggacggcgatccagaaccggaacatcacagggatcaaagagttcagttcctttatcccgaacctctttatgccggactacggatcgaaactgacctcgccggtctatatccgcgggatcggatcgaaaatcaacgctccctcagtcgggctttatgtggacggtatcccctatttcgaaaaatcggctttcgatttcgatttcaacgaggtggacaggatcgaagtgctgcgcggtccgcaagggacgctctacggtcgtaacacgatgggcggcatcatcaacgtctatacgaaatcgcctttgaaatacgaggggacaaatgtctggctttccaacggcagctacggttaccgcgattatgccctctctcattataaaaagatcggagaaaagttcggatatgccatctccggtgattaccggaacagcgacggctacttcaccaacctgtttacagacaagaaagcggacgacatgaagtccggctccgcccgcatccgcctggaatggaagcctcagaagaacctttctttcgggctaatgagttcgttcgaccgttcagtccaaggcggctatccttacgccgtctgcgattcggtcacgcataaaccgggcgaagtcgactacaacgattacagtttctacaaacggacgctttcgacgaccggcttctcggcagattaccaggggacgggctacagcatcaacagccggaccgccttccaatatctctcggaccatcaaggcatcgaccaggatttctctccccgaagcatctatttcgcgcgtcaggatatgaagcagaaaatgttttccgaagagctgaacatcaaatcgacgactcccggacgttacaaatggctgttcggcgccttcggtttctggcaggggatcgacaacaccgtgacactcgattatttcaccaaaggctatgcgacacgcaagctgtacgacacgccggcctatggtgtcgccttctaccaccaatccacaatcgacgacctgctgacgcgcggcctgtcactgactttcggcatccgctacgattatgagcatacctccaacgatttccttttctataaagaaacggacggcggtagcgagcagatggacgccttcgacagccggctcaagttcagccaggtcacgccaaagatcgccctgcaatatatgtttccctccaccggcatgctctatgccaccgtgacgaagggatataagacaggcggcttcaacacctctttcgaccgcgaggaagaccgcacgttccgccccgaaaccagttggaactacgagttgggagccaaacacccgttcctcgacaaccgcctgaacgccgagttctgctttttctggatcgactggaaaaaccaacagatttaccagatgctcgccacccagaacgggcaattcctgcgcaacgccgggcgtagcgagagcaaaggcgtcgaggtcagtctgcaagggaatccggtcaacgggctgatggtgcaggtgaactacggcttcacacatgccaccttcaaagattacaaggacgaacggcgaggcatcgactacagcgggaatttcctgccgatggtcccgcgccacactttcgctgtcggagccgattatacgatcccgaacccttgccgtcacatcgaccgcttcacggtcagcgcgaactacaccgggacgggacgcatcctgtggaaagaagacaacaaggtttcgcaaccttattacggactgttgaatgcaaaagtatctgccacaaaagattttattacctttgcgatctgggcgaaaaatatgaccggtgcagactattcggctttctatttcgagacaggcggaaaaggcctggcacaaaaaggaaggccgttcacgatcggcgggaatatacaattgagtttttaaaagtctcggcagaagttcgggcgacactttgaaagttcttaaagtccccgaccgaacttcggacgacactttgaaaactcttaaagtcccggccgaacttcggatgacactttgaaaactccaaaagtcccggccgaatttcggatgacactttgaaaactccaaaagtcccagccgaatttcggacgacactttgaaaactcttaaagtctcgtccggaagccggatgattatataacgatattatgatacagaaagataaaacatacaacctcgcgaccttcttctgcctctacattgcgcagacgatcccgatgagcttcttttccaccgtcatccccgtcatgatgcggcaggaggacttttcactctcggccatcgggcttctccagctgatcaagctgccctggatcctgaaattcctctggtcgccgatggtagaccgccatgccgtgacgacgggcgactataaacggtggattttttcttccgaactgatctacgccggcctgatcttcgccgtcgctttccttgatttccatacggacttctatacgatcgtcgccttgatcatcatatccttcgtcgcctccgccacgcaggatatcgcgaccgacgcgttggcggtactcgctttcagccgaaaagataaaagccttgcaaacagcatgcagtcgatgggaagtttcggaggttcgatgatcgggggcggtgtcttgctcctgctcttcaagcaaatcggctggaacggtctgctgccttgcgtcgcgctgttcgtcatcgccgcccttctaccactctttttcaacaaaggcatccgcatccagccgaaggaagcgcacgaacgggccaaaaaggcagatgtgatctatttcttcgcccgccggagcatctggaaacagatcggtttcctctttctttactattccggcctgatcggtacgctcgccatgctgaaaccctggctggtcgacctgggctacgacatgaaggagatcggggtgatgagcggagtggcggggacattcgtcgggttcctctcctcgtttgccggagggatgatcgtacggcggatcggccgtttccgcgcgcgcatcctgttcgcggtgtttgtcttgatggcgacactttacttcctcggactctcctacgtgcatccgacgacgcccatgctctacggcgggattttccttctgtggggcagctacgggatggcgacgatcgtggtctatacgacggcaatggactgtgtacgccctgggcgcgaagggacggatttcacgatccagacggtcatcacgcatctcagcggcatgttgatggccatcctgagtggaaggattgcagatcatacgggttatcacggactcttcttcttcgaggcaagcatcgccctgatatccctcatttatatagtaacggttttcagaaaagataaaaatacgatatgaaacaagaacttttagataaatacaatgtgccggttccccggtacaccagctatccgccggcaaactattttcatgacgggttcacaagccgggattatgcggatgccatccgtgaatccaaccgccagcagccggaatcggtttccttctattttcatattcctttctgccaacgtctctgccattattgcggatgcaattcctacgccgctcccaagcctgaaatcatagatcgatatgtagccgcattacataaagagatcgacctgatactgcctttactcgataagaaacgtaaagtctcgcagatccattacggcggaggaaccccgacatttcttccggctcttgagctgaaagagttgaacgcacatgtttcagatacgttcgaattgattgaaaatccggaaaaagcaatcgaatgtcaccctggctggatgacagggcaggattgggagaaactggcaaccgcgggattcaaccggtttagcatcggcatccaagacttcaacaaacaagtcctgcaaaccgtacacagacaagccccgctgctgcaaccggaagaaatcgtaacgatcctgcgctcatgcggagtacgcatcaacatggatttcctctacggcttgccccaccagacggaagcgagttttgccgaaacgatcgaaaaagccgtttccctgaaaccggaccggctcgtcaccttttcgtatgcgcatgtgccctgggctttcccccggcagaaggtattggaaaaaaccggactgccttcgggcgacgagaagagccggatgttcgaagcggcccgcaaaatcttatgcgaagcggactaccagccgatcgggctggatcatttcgtccgcaaagacgacgagttatacacagctttgctgaacggacagctgtatcgtaatttccagggatattgcacgcgccgcacaaccggtcaggtctatgctttcggcgtgacagggatcagccagctcggaacggcttacgcccagaacacaaaagacatcatggagtatatcgagaaagtcgaagccggtatcttgcctgtcgccaaaggatatctcctgagccgggaggaacagatcacacgggaggcaatcgaaatgttgatgtgcaactaccggatcgactggaacgaactgtcggaacagctttccgtccccgcccgctccatcaagcaggcaaccgcctatgacgaagcctgtctacgcgaatttgcagaggacggattggtcgagtttgacgaaaatcaaatcaggatgacacctgaaggcaggcttttcgtccgaaacgtagcggcttcgctggacaagctgatgctcggaacaaataaatcattttctaaaccggtataacgcaatggaaccccaacagacagatattttgattatcggcgccggactgaccggattgacaaccggcttctggttgacccgcgccggaaaagacattcatatcctcgaaaaggctgatcgcgtcggaggacaaatccatacgttccgcgaaaaggattttgtctacgaaagcggccccaatacaggtgtagtctcctatcccgaagtcgccgaactattcgaagccctctctccagcctgtgcactggagactgcccgcgaagaatccaagcgccggctgatctggaaagggaaccggttccgggctctcccgtccggactgttcagtgcggtcacgactcctctgttcacgcttggcgacaagttccgtatcctcggagagccgtttcgggcaaaaggcaataacccggatgaatctgtcggcgagttagctgcccgccgcctgggtaaatcgttcctgcactatgcggtagacccgtttctgtccggtgtctacgccggcgatccgatgaagctcgtcactcgttatgcgctcccaaagctctacaacctggaacagcaatacggaagcttcatccgcggaaccatcgcgaaagccaagcagccgaaaacagatcgcgaccgtctcgccagcaagaaagtattttcagccgccggaggattggacaaactgaccggtgcgatggccgaggcaatcggtccggcccgcatcacactttcggccgccgacgtcacggtccgcccttgtgcagacaaatggatggctacctattcgacagccgacggcgaacagaccattattgcggaacggataatcacaaccaccggtgcttatacattgcccgccctgttgcctttcgtcccgaaagaaaagatggagcggatcagcaacctgcattatgcaccagtcgtacaggccagcgtcgggttccgcgacaccggtacattacgcttcgatgcgtttggaggcctggttccttcctgtgagaaaaaagacgtactcggaattcttttcccctccgcttgttttaccggacgggctccggaagagggtgctctcttctcgttctttatcggaggcgtaaagcatgccgacctgacgacctggccggaagaggagctgaaagtgctcatcaggcacgagctccacaccatgctgaaattcccggaagagacagaacccgatatgatccgtatcttccgtcacgaacatgccattccgcaatatgaacagagcagcggctcccgcttcgaaacgatcgacgaactgcaagcgcgttaccccggcctcacgctggccggaaacatcaaaggcggcatcggcatggccgaccgtatccgccaggctacagaaattgcggataaattaataaacgggtaaatcatcatttacattatacaacacacattaatatggaagataaaatagtcgaaatagcccgtttctatgaaccggaagcagcacagatgatcgaatccctcctgaaatcggaaggggtcaactgttacctgagaaacgaatatacgagccggatccaatacccggccaatgtgggcggcatccgcatcgaactgcttgaaagcgaagttccccgtgcaaaggagattctggaagcaaacggatacgaatttccgaaagaagacgaagaggacgagcagctccaagccgtttccggttgggtacgccacgttccgttcctccgacatctgcccctcgaaaaacagatcatcgttctttttatccttgtagccgtattcctggccttggtcatttacttcggctcgcttgtttcatccaactaaacaattgtaaactatggcacgcagaaagattacaaatagtcaagccgtatgtatcactcttttgtggggtatcctttgctacatgatgcttgcatacagcgaaaagataaccttcgacatcgtttttgccttggttgcgtcagctatcattgtgttcgtccctatctataagagcagaaggcgaagagacgagtgacatttagttacttttacccgattaaaataccgaaatgatatttttaatgcattttttctttcaaatatttgtttgtgtaaaattttagcttacctttgcgaggtcataaaaaaacggctaccggttaacaaattgacattataaatataacattctaaataaaatcagtcttatgaaggcaagtgaagttttagacaacttaaagagaagatttccgaatgaaccggaatatcatcaggcagtttcagaagtattaggaacaatcgaagaggtttacaacgaacatcccgaattcgaaaagagcaacctgatcgaacgtctttgtattcccgatcgtattttctccttccgcgtaacctggatggatgataagggacagatccaaaccaacatgggataccgtatccagcataacaatgcgatcggcccgtacaaaggtggtatccgttttcacgcttctgtaaaccagtcgatccttaagttcctggctttcgaacagactttcaagaactcgctgacaaccctgccgatgggtggtggcaaaggaggttccgacttcagcccgcgcggtaagtcaaacgctgaaatcatgcgtttctgccaggctttcgtattggaattatggcgtcatatcggcccggacacggatgttcccgcaggtgatataggtgttggcggacgcgaagtcggctatatgtacggaatgtataaaaaactggctcaggaaaacacgggaacattcaccggtaaaggacgcgaattcggcggttcactgatccgtcccgaagctaccggttacggaaatgtttacttcctgctggaaatgctgaatacaaggggaatcgacatcaagggaaagaccgtttgcgtttcaggttcaggtaacgtagcccaatataccgttgaaaagctgatcagcctcggcgctaaagtcgtgacgatgtccgactcggacggttacatctacgatccggacggtatcgaccgtgctaagctggattacatcatggaactgaagaacctctatcgcggccgtatccgtgaatatgcagaacaatatggttgcaagtatgtggcaggtgctcgtccttggggagaaaaatgcgacattgcaatgccgagtgcgactcagaacgaactgaacggagaagatgccaagacattgctcgccaacggttgtatcgccgtatcggaaggagccaacatgccttctactcctgaagctatcgacgcattcctggaagctaagatcctgtacgctccgggtaaggcagccaatgccggcggtgtatctgtttccggtctggaaatgacgcagaacgctcagaaactgagctggagcagtgaagaggttgatgccaaactgaaaagcatcatgcagaatatccacgaacaatgcgtaaaatacggcaaacaagccgacggctacacaaactacgtgaaaggtgcaaatgttgcgggcttcatgaaggtagccaaagcgatgatggcacaaggcattctttaatcaattgacaattaaaaagagagacaattagagattaatggtcataaagaaggcgggcgttccggtaaaacggtacgtccgcctctcttatttcccaacaaaattgtcaattctcaattgccaattgtcaattgtttgctactttagtgccgaaaatagaaaaacatgattactgaagaattaaaacaactttaccagacacataccggttcaccggcaactgatataaccgaactatcctcttccggctctaaccgccggtatttcagattgtcaggttccgtttccctgatcggagttagcggaacttccatagaggaaaacaatgcctttatttatatggccgcgcatttccgggaaaagggattgcccgttccccaggtttattgctggtcggttgataaatcgttctatcttcaggaagacctgggcgacaccttgctctttcaagcaattgagaaaggacggaaaagttgtttcttcgacgagacggaaaagtctttgctacacaagacgatcacacttctgccgactctgcagtttaaaggtgcggaggggttcgacttcagccaatgctatcctctacccgaattcaataggcgttcgatcctttgggacctgaactatttcaaatactgtttcttgaaagctaccggaatggaattccaggaaaaccttttggaagatgatttccagaaaatgagcgatgtccttctgcaagaccatacaccgacattcatgtaccgggatttccagtcgcgcaacgtgatggtaaaaaatggcgaaccctggtttattgatttccaaggaggacgcaaaggcccgatctactatgatgtcgcctctttcctctggcaggcgaaagccaaatatcccgctgagttgagacaggaattgatagccgactatctgcaagcactacgcgggtatatggacatagacgaaaagcatttcttccggcaattacgccatttcgttcttttcaggactttacaggtcttgggagcctacggtttccggggatatttcgaaaagaaaccgcattttatccaaagtgtccccttcgctatcgacaacctccggcaacttttgaaagaagattatccggagtatccctatttatgtaccgtactacgggagctgacaaacctgtctcagttttatgacgacatccagaagcatacgctcaaagtcaagatcgtcagttttgcctataaaaaaggaattcccaacgatccgagtggcaatggcggtggatttgtctttgactgccgcgccatcaataaccctggtaaatacgaacgttacaatcattttaccggattggacgaaccggtgatccgtttcctcgaagaagacggagagatcactcgtttcctagatcatgcttatgaaattgtggatgcttctgtcaaacgttacatggaccgaggatttaccaatctgatgatctgtttcggttgcacggggggccagcaccgttcggtctactccgcccagcatatggcggaacatattcattctaagttcggtgtccgggtagacctcgtacacagggaacaaaacattgaacaactctttaactcaatattatgaaagctatgattttcgctgccggtttgggaacacgcctcaaaccgctgaccgacagtactccaaaagcattacttcctatcaatgggaaacctatgctcgaacatgtaatcctcaaattgaaagatgccggctttcaccagatagccatcaacgttcatcatttgggagaccagatcatcaacttcctggcagccaacaataatttcggtatccagatccatatctccgacgagcgggattatctgctcgataccggtgggggaatcaaacacgccaccgcctttttacaaggcaatgagccgtttctgatacacaatgtcgacatcctgtccgacatcgacctccgtgcgctttacaatcatcatatagagacaaatccgttagcgacattattggtcagcaaacgcaacacctcccgctatctgcttttcaataaggaaaataagctatgtggttggcgcaaccgcgagacgggcgaagtaaagtcgttctaccccgatttcgatccgaaccaatataacgaatatgccttcagcgggatacatgtactgtctcctaaaatattcgactggatggaagaatggaccggcaagttttcgatcatcaacttctacctctccatctgcgccaaggccaacatccacgcctacgctgacgaagaccttcatctgatagatgtcggcaaaccagaaacattgcaggtggccgaaaaatggatgaaaacacttattgtataatatcgtttatttaacaaagatatgcttctttcgtaaatcgcttcgcaatccggctttttatctttctaaaagaacttcctgccacaaggtgcacagtttttccaacaaagacggttttcattggcccgacgaccgtcttcatatataaagatctcggcacctcacggcaacgaggacggtctccgttcctatgacgaccgtcctcatgcccataaagccctgaatttcttttcaaatatccgaatctccaccaatctcttttgccacaagcaattctcaaggggttaagcttttctcaaatgtaagcgtttctcccctttctatctctccccaaacaacatactttcattttctgcctatatcacattttcgtttatcagcaaaacagaaaaaagcagtatcaaaatatcaaactaaaacgatctgatatcttaatcgaaatagaaaatacgggaaggcagaggttattgtccaattttctaatgaactggaatcacaaaaaagtttgttctatacaacaattgttttaaagaatggcaagtaatatcggtaaataatcctttaactctacacgaagcaacttcaatgcctgctgaatacgataatcgactgtcttggaagaaacttccagacacgtcgctatttcaccatacgtcatatgctggaaacgatttaactcgaatgcttcccggtaactgtcgggaagccgttgcaacgcctcttctatcttacgactcagttcctccacgatataaaaatcaggatcttcatattctaattgttgattgtcgtacaatgtattaataatcttctgttttatttcatttcggctgatcaacgtcaaacaacggttcttcacagctttaaacagatagctcttcggagagatctcaaacgtatgcatctcccgattctcccacagccaaaccatcacatcctgtacaatttcctgcccgtcgtcatactcgacaaaccgttgggcataagcacacaaggaagggtaatacttcaaaaaaaggacatcgaacgctttttcatctcccctttggatttcctgaaaaagagtttcgtctgccactatatcagaaatattacaagacatacaaatcactgttctataagttttaatcggaaatatttatacttatttgcaaatataatattttctaatccaacgaacaattacaaatacatgaaaaaaaaatcacttttcatttaggagatttcatttttcgtcagtcatatttataaaaggacaattatggacaaacataaacaaataaacgaatcgatacttttgggttatttcaccggaaccctctccatacctctgcaacaagaagtagaagattggatctctgcatcagaagaaaacaaaaaaatagcccgggacatacaatctatatgcctggcaactgagacattgacttgtatccggcaaacagattcaggtacagccctgaaaaaagtaaaaagcaagatacattcccaccggaaaatttctctatccgcctggatacaacgtattgcggcaatcctcatccttccgcttatcatttccactatatatttcgcattaaaaaaagatccgatcgaatatatagaaatcagaactaatccaggaatggtcgctgcagtcaatttaccggacggaacaaaagtatggttaaactcacgttcctatctgaagcacccgacgcgttttacaggtaacacacgtgatgttgtgctgaacggtgaagcctacttttccgtccataaagacaaaagtaaacgtttcactgtcagcaccccatttgatatcaaagcagaagtactcggtaccgaattcaatatggaagcctatgcagccgacagcagcgtaaggaccaccttggtatctggctccattcgactttcatttttagacgataatcagaagcataaatcatttttaatgaaaccgaatgaagaattcacttataaccaatatactaaaaaagttaaagtcgacaaaccatatattccgacacaaacttcctggaaagacggcttggtcgtattccggaacacaccatttaacgaagcattgaaagtgttaagcaaacgtttcaatgtcgagttcatcgtaaaaaacgacaagttatataacaactccttcacaggacctttcgatggacagcacttacaactaatcctcgaacatttccgtttggcttccggtattcaatatcgcttcatagaccctcaaactgggcaagaaggaaatattaaagaaaaaacgatcgttgaattatattaagtgtaaccttatttatcaaatctcatgaaagaaaataatcccccttgaaaacaaaacatacgggaaaatattggcgtatttccccgtatgaaaatccatcgcaaacttgtttggcgacaagtataagcaacttttttataactctaaatcatttacaaatctatgacaaattattttagcttccaacatttcaggaagatgaatgttaggttcatgctcctgaagaaaataccattatgtatgaaactatccgtaataatgttatttatctgtgtcggattagcctacgcgtccgatagctacagtcaaaatgttcttttaaacatagatgtgaacaacaaatctgtacaggaggtactggatgaaattgaaaaacaatcagactttcatttcttctacaataacaaacaagttaatacctcacgtatcgttagtataaaaagtaaacaaaaaaatgtttttaatgtattggaacaattgttctccggaaccaatatcagctataaagttttagataaaagtattattctctcccccaaagaggtactagttgcccaacagaaaagcagaaagatcaccggagttgtcaccgatggaaaaggcgaacctgttcccggcgccaatgtcattcaaaaagggacaacgaacggaacaatttccgatatcgatggaaaattcagtttagaagtaccagataatgcgacattggtcatttcctttatcggatacgtaaccaaaaatattgccgtcggacataaagaaatattcaatattaccctactcgaagattcacgcaaattagatgaagttgttgttacagccttagggatcaaacgagaagaaaaagctctgggatatgctgttcaaaaagtgaaaggagataatctgcctttagcaaaaacagtagatgtggcaacatccttaacgggaaaagtggctggtttgaatattcaaaatagtacggaattcaatgaaacacctaaaatcaaactacgtggagaaactccactaatcattgtagacggtgttccctatggaaacatcacgttagacgaaattgcatccgacgacattgaatctatcgatgtattaaaaggtgcaacagcctctgcattgtatggtgctcgcggaacaagtggagccataatgataactacgaaaaagggggccaatgaagaaggcttgaacatcaatatcaatagtaatacaatgtttttttccggatacctcgcattccctgaaactcaacattcttatagccgtggtttcggaggtaaatacaacaatgactatgtctggggagataaactggatataggacgcactgctattctttgggatccgttcaattatgaatggcgtgaacaggaattggtatcaaaaggaaaagataacttcaaaaacttcctgcaattcagcatggttacaaacaataatgtcaacatttctcaaaaaggtaaatacggttcattccgagcctccatcacagaagtatacaataaaggacaataccccaatcagaatttgaacaaaatcacattctctgtcggaggagaaatgacttggaaaaactttaaaatggacgcttcggcagcctacaataaacgcgtttccaccaatgaccacggatccggatatagcggtagctacatatacgacatggtaatctggggaggttccgaatatgacgtacgcgattatcgcaattactgggtaaaaggaaaagaaggtatgcaacagaactggtatgatgacagttggtatgataatccatggttcaaggcttatgaaattacagacgcttacgacatcgatgttgtcaatgccgctttgaatgcaagctatgagatcactccctggttaaaagcaatggttcgttcaggggtcgatgtgtatacaaaacggaatgaatggaaaaatccgatctctgctaatcaggcctgggataaaaaaggattctttggagtaagccgtggtacggatatgagcataaacacagacgctatgttaatggcagataaaacttggggtaagttcaacatgaatctgctaggcggtggaaacatttattatacacgctatgactttatgagtagtaaaacaaaaggagggctttctattccagaattctactccttaaatgcctctatcgatccaatcgaagcaaccagcgaactacaacaaaaacgagttaatagcgtctacggcaaagcatccctttcatgggcaagcacttattttctggacgtaaccggaaggaatgattggtcttcgaccctttcttctgaccagcgttcttacttctatccatccgtttcaggaagtattgttttatccgagattgtcaaattaccaacttggtgggatttcctaaaagttcgggcttcatggacaacagccaaagaggatgccaagatatatgccaataacaacgtatattctgtcagtacaaatgtatgggacggactttcaacagcgtcttatccatccagtaagatcggtggacaagtacgtccaaagaaatcggaagtatgggaagtcggaacagccactaacatgtttaagaaccgtttattccttgacttttcttattatcgtaaaatggaatccgattttattatcgaaggaggagtcagctgcgcaactggcttcaatagtattcaaaccaattttaaagaaacgcgtcttcgctccggattcgaaattaccattggaggaacacctatccagaccaaagattttagttgggacatcctaacaaactggtcacacgaccaatatacctacaaaacgatagacccagattattcgactaaaaaaccatgggtcaaagaaggagctagctgggattggcttgccgtttacgattgggaacgtgatccagaaggaaatatcattcataatggaggtatgccagttaaacaaaactttcaaacaaagatcggaaatactactcctgatttagtttggggtatcacaaacacattcaaatacaaaaacttcacactcagctttacgcttgatggtcgtgtcggcggtttatcttactctaaaactcatcaaatgttatggaatacaggagctggcattgacactgatacacaatggcgttatgaagaagtcgtaaacggaaataaaacctatatcggacaaggggtaaaagttgtttcaggaagtgtaactcgcgatccagatggcaatatcatagaagatacacgcgtgtttgctcctaatgatgttgttgtctcatatgaatcttatatcagtaaatatcatgattcacatcacaatgcatgtcgccagaatatactgaaagaaacgttcttcaagctccgaaatctttcactcacatatgatctgccatccacattgtgccaaaagatgaaaatgaaaagtgcttctattggtttcaccggtcaaaatctgttcctttgggctaaagaatacaaatatgcagacccagataaaggaggagactcttctggtacagaaagcttaaattccccatcccaacgctatatgggattcaatttaaaagttaatttctaatctgataaaacaattcaattatggaactgaaatataaagcaatcgcttgctttctgataggaatattttcattatcaggatgcacatctacttttgacgatctgaacaccaatccggatacaacaactaaagtaaacgcttccatgcttgcctccaaagtcattcttgacatgaccaaatcggcaagtaactggagaaatgaatttctggtcaaacggatgttttggggagaacaaatcgacgatggacaatataaccgttttggaaaaggcagttttgataacatccaaactttaacaaatgcctggaaaatggttgaactatcctctgaagatgatttggatgctcatacaggtttatattattttctgaaaggctggtatttctatcgtacaacgatggatatgggagatatcccttattcggaagctctgaacatcgaagaacatcgttatccccaatatgatgaacaaaaagacgtatttaaaggcattcttgaagaccttgctcttgccgacgaatattttgcaaaatccaaacaagctttttccggagatcctttctaccagggagatccgaaaaaatggagaaaagcgacaaatgttttacgtttaaaagtcctaatgtctctatccaaacgggcagacgatacacaggagttgcaaataaaagaaacgttctccaaagttgtttcagaaaataatctatttaaaagcaatgaagataacctacaggtcatctactctgacaaagatggtcaaaaaaatccctatcacgtaacggaaactcgtagtatcgactattatgccggcacacacacattaattgatcctttaaaaagattcaaagattaccgattattttattatctggctccagcagaagggttgacaaacgaattatacctgccagcaggagaaaaacttttaaagccaaatgactggaatgcctatcctgcagtggatgccgctggcgtatacgacattgaaaaagaaaaaatcgcaaaacgtatgcactcccgtcccaatgacgtataccgtttgagttatgtcggagtaccttgcatccgtttaggatatgcagatatgaatttccttctcgcagaagcggttgaaagaggatggatcaccggctctgcaaaacaatattatgaggaaggcattcgagcttctttcctgtttgtccgtaccactgtccctgctgaatacaacaacggagtagagattacagatgattatattacatcatacctgaaaggcgaatatgtagcctataacacaaacgggtctgtaacagatcgtctgaagcaaatctggatgcaagcttttctggccagatacttccatatggccacagatgattactacgaatatcgcagaaacggatacccggaattcccaatcaatccagaaacaaacctaaataatgcaaaagataaaattccaatgcgttacatgtatccagaatctgaaaccaactacaacaaagaatcattgtataaagctttggatcgccaatggggaggagttgacgatgtcaacagtattatgtggcttctgaaataatttattcatatagaagagagcaccgaatataaaaacattcattatattcggtgtctcatttttaatttatatatatatcatgaacaaaaaacttttttttatcttaacgattattcatctcaatattttttgtatatccgcccagatctaccctgtccggcctcaactatccgacaagcattctttttccatgatcctgctgcctgatccgcagagttataacaagttcgatgctaaccaaccgttgtttgaactacagacagcctggatagccaacagcatcggatcgctgaacatcaaaggagttctgtgtaccggtgatttggttgaacagaacgagatacggattccggacggcataaacggaaatcagacaagcgaagaacaatggcaggccgcatccagggcatttgaacggctcgacgacaaaatatcttatgtcgtttgtaccgggaatcacgattacggatatgagaaagcagaaaaccgcctctgccaccttcctgattatttcccttccgagcggaatagctgctggaaaaagtcattggtcgagacaggcctgaactatcaaggtattccgactcttgaaaatgcagcttatgagttcgagacagacacatggggaaaactattggtcatatcactcgaatttgctccgcgtgacgaggcgatcgaatgggcggccaaagttgccggtaaagccaaatacaaaaatcataaagtgatcctgctgacacactcctatatgtcaccggaagccaaacgtcacatcaaggaaagctacaaaatatcacccgccaattacggagaagccatctggcagaaactggtctatccttcctccaacatctgcatggtgatatgcggacatgaatgcgagatagcagactacaagggcaatgtcagcttcaggactgacaaaaacagcacaggcaagaatgtagcccaaatgatgttcaacgcccagaccgccgacggtcaatggcatggcaacgggggagactgctggctccgcatcatggagtttatgccggatggaaagacgattaagatcaaaacattctcccccctgttcgcactttctcccctgacatccgaaaaggcttggagaacagattcatacgatcaattcgacatcacgatcgaataaaccattcataaacaaaaaccatctaaagatgaaacaacttcttattattctttcacttgtgctcggatgcctgcaaccaggctacacacagaaacccgtcttgaaattcaataaagacggcaagttcaaaatcgtacagttcacggacgtacattacattcacgggaatcccaagtcagccgtttctctcgaacgcatcaacgaagtgctggatgcggaaaaaccggacttagtgctattcacaggtgatgtcatctacggtcaaccggcagaggaagggatgcgcacaatcctgaacttagcggccaaccgccaaatacccttcggagtgacattcggcaatcacgatgacgaactgggacttacccgtactcagctattcgatatcatacagacaataccttacaacctgaccgattccgtggcaggagtcacaggagtgaccaactttattcttcccttgaaatcgtccgatggaaagaaagacgcagccatcctgtattgtatggactctcactcatattcacagatcaagggaataggcggctatgattacatcaagtttgaccagatccgatggtaccgcgaaaacagcgcgaaatacacaaagcaaaacggcggcactcccctgccctcgctggcattcttccacatcgccctgccggaatacaaccaggccgcatcagatgaaacggccatcctggtcggaacccgaaaagaaaaagcctgcgctccgcaactgaactccggcatgtttgcctcgatgaaggaaatgggggatatcttaggtgtatttgtcggacacgatcatgatgatgactatgctgttttctggaaaggcatcctgcttgcctacggccgttacaccggtggcgacacggtgtacaacaacctgagcaacggtgcccgcgtaatcgagatgactgaaggatcaaccaatttcagaacctggattcgcctaaaagacggggaggtgatcaacacggtaaactatccttcggatttcatcaaaaagaaagactaaatcaggacataatccgaccgttttcaaaacataggtgttttgaaaacgaatcatgcatgtttcttcctcaaaacacctatgttttgaaaccaagacgaaggtgtgtagaaatacaatagatataacttaggcatggattacatgaaaaaaataaatttatctatgtaatccgtgcctaaaagatcatgacaaaggagttttaacacatttacgttctctttatttatcattttacttttctggtttcaacaccactcccaaactcttcttgccgtccatcttgattacgaccggtttatcgaaacggacatggcgaaggtattcggtttcctccaccgctggtaaggaattcagatatccctcatcaaaccagccatcacccttaaacgggttgatcgtaaagtaaccgacaccaaacgaagtcagattttggaaaaaatgcgttccctggctcggatcgacacgataattctccagcccgcattccactataacacgtgcattgctgatatgaggccatttcaccggaatgcccagccaggagtcactacttccccaacgaccaggaccaaccaaaacataattcttttcttctccagtgaactggcggttcatcttctcgatatcataggctatcgactggttgttggaggaacagaaagcaccggtctttacatatataatatcctgcacatccgtcacaatgccatgtcccaaaacgcttgtcgatgtaagtattgtatcctcttgttccacaagcgtcaggtcttcttccattacctccttgttatccacgatcgggcgaacttgcaacagatagaatgtagcgaaaccgggattctgcggatctatatttaccgcaaactcaatctcgataggccgccccatctcatcctgtccgacatgcagtatctgatcgagcgtatcggccaacggaaaaacctcatgttgaagaacattcacaaaagacaatatcttacgcccgccaggatagtaaccgtcacgaataacctgatcataaggatcgtatgtcgaaacaataaacttcagagaaccgtccgcatccgcgtctttcagatttagacgaagcaaattaaacgaatcatccacagaaaactgatctgccagattcttcaaatcaagtgcataaaaacgagtttgagtctcacggagcgcaaagtccatcgtactcatctgcaaaatattgtgcggatgacgaggagagaaacgtaaagtctgccctccgtctacgatatattttccaagccccaaagcaatattggcaattccgtcttccgccttttcatttccaatcgggtagaaattcaacgaacgtgcgacaccagagatagtaggatagaaacggtcattataccggttccctactacttcctgtagaacgatcgccatcttttcctggtcgataaggttcgatgtcgccgtcatatatgccttgctgtcacgataaaagacagaagcgtagactgctttgatcgcgtcgcttaacgtacggagcatatcatatttatcttccagcttgggtaccatgtaagtagaataaatcccagcgaacggttgataatgggaatcttccagaagactagacgaacggacggcaatcggacttttgacaacatcgaaaaacgccatcaggtcttcaatcagacgggcgggaaggctggcacgcaggaaatatttcaggatcgtttcgtcatccacatcactcagtgcgactggatacagttcgtttgtctccataaattcgtcgaagatgtctgtacagatcacgaccgtcttcggaatggtcacagcaaagtgatcgtgttccaacttgggataacgctttaccatcgccccaataaacgccaggcccctgccctttcctcccagcgaaccgtcgcctatacgggcaaagttactatattcgtcgaagcgctccttctgatagactgcaacaacaccggaattcttcatccgacggtactgcacgatcaagtcgaaaatcaacttgcgcgcctcatccatatccttgtagtcgctcacatccacacgcttcaacacctctgccggcggaaacatggcacgggaatagaagaagcgggaaaaatggttacgactcagatgataaaccagcgaatcgtccggtatctgaaagaccttcttttgcaaatccttcaagtccttgatgcgcatgatctcctccttcgtctgtggattcaggatgacgaaatcgccgaaaccaaaacgctgcatgatcttcttcctcagatcctgcgggtaactcttggaatttttgtcgataaaggaagctcccagttctttcgcatacactttgttgcttgcctccgacgattccaagacaaaagggatgatcaggccggtcttccgcacatactgcccgaacttgtatccagcgtaaggatctttcactccgtcgtgcatgaagctcatgtccgagatgatccccagcatattatcgcggtactggttgaagatgcggacagcctcctcataggtacgcgccaacttgatcttgggacgcccacgcatacgaagtgtacgctgatggtcgttcaacgcctctttagcaaacatctggctctgttccaatacaaatttatacagatgcggcaaagccgaagaatagaaacggacggaatcttccaccaacaagataatctgcacaccgacactggccgtatcgtccggcgcattcatcttgtcctcgatcagcttgattatggcgagcaacagctccgcatttcccaaccagctgaacacatagtcgatcgcactcaaatcttcattggcaatccgcttggatacctctttcgagaatggggtgaggactacgatcggtatattggggtaatgaatcttgatctccgtcgccgccgcaaagatatcgcggttatccatattcggcatgcagatgatcagttcgaagttacggtctttcaactcagccagtgcctcctcctctgtcgtcacctgtgtgaaacgaggcgggtaacgaaggcttagtgacgtatattcgttgaatatctgctcgtccacccgcccatcgtcctccagcatgaaggcatcgtatttagtagcgataagcaatacattatatatacgcttattcattagattggcgaatgatgtgtctttaaacacaaggttcttaaagtccggtattccgctcataatgattcgatagaattaacggcctcaaatgtaaggaaaaaaacaatcaaccgaaagcatgtgacaagatttgagcaagtggcacatccgttccctcagcatggcacagacgtttccttagcatggcacaagcatttcacctatatggcacaaacgtttcacagcaaggaaacggctgtgccaacagcaccacacatttcctggcacaaagtgaaaccggaatcccatccgtaggaatccggattttcacttaaagaacattgttcaaaaacataaaaagaactatcaaaaagtaagcaaaacattttgtcaacccaggctattccctatatttgcaaacagaatgttatcttaaaaagaaattatatactatgaagacagaagtaatcttatcagcactggaagcaaaacatccgggcgaaaaggagtatttgcaagcagtaaaagaagttcttctttcaattgaagaagtgtacaaccagcatcccgaattcgagaaagctaaaatcatcgaacgattggttgaaccggaacgtattttcaccttccgtgtgccttgggtagacgacaaaggggaaatacaagtcaacttgggatatcgtgtgcaattcaacaacgcgatcggcccgtacaagggcggtatccgcttccatccttctgtcaacctgtccatcctgaagttcttaggattcgaacagactttcaaaaacgctttgacaacattgccgatgggcggtggtaaagggggatccgactttgctcctcgcggaaaaagtgatgcggagatcatgcgtttctgccaggcattcatcctcgaattatggcgtaacctcggaccggaccgcgatgttccggcgggtgacatcggcgtaggaggacgtgaagtcggttatatgtatggtatgtataagaaactggctcgcgaaaacaccggtacgttcacaggtaaaggtatggaattcggcggctctatcctccgtcccgaagcaaccggtttcggtgccctctacttcgttcaccaaatgttggaaactcatggtatagatattaaaggtaagactgttgctatctccggtttcggaaacgtcgcttggggagctgccacaaaggctaccgaactgggtgcaaaagtcgtcacgatctccggcccggacggctatatctatgatccggacggcatttccggaaaaaagatcgattatatgctggaactgcgtaactcaggtaatgatattgtagctccttacgccgaagaattccccggttcgaccttctatcccggcaagaaaccctgggaacagaaagtggatatcgcactgccttgtgccacccagaacgaactggacgcagacgatgcacgcaagctgatcgagaacaagacatcatgcgtagccgaagtatccaacatgggatgtacagctgaagctgtcgacctgttcatcgagcataaacaactttttgcaccgggcaaggctgtcaacgccggcggtgtcgccacttccggcctggaaatgactcagaacgccatgcatatttcgtggacagctgccgaagtcgatgacaaactgcatcagatcatgagcgctatccaccaacaatgtgtcgaacatggaaaagaggatcaatatatcaactatgtgaaaggtgcgaacattgcaggcttcatgaaagtggccaaagctatgatggcacaaggaatcgtatagatcactgtgtattcaacatacatagagaagtgtgtctatgagaaggggatgcctgtaattgcaggcatccttttttgtttcaacggactttgcccggattctttgcaataaagtccttccatccagtatatttcttttcctgtaccggattattcgtctggaaataatggcaaacggcagctgccaatccatctgtcgcatccaattgcggcaacatggatgcttccggaatatgcaggtagcgctgtagcatcccggccacttgttcttttgcagcattcccatttccggtaatggacatcttgatctttagcggggcatattcaaatatcgggatatcccgttcaagtgcggcagccatagcgactccctgtgcacgccccaatttcaacatactctgtacgttcttcccgaaaaacggagcttcaatggccagttcgtccggatgatactgatcgataagtcccaagacccgctcaaaaatcttacggagccgcaaataatgatcctcgtatttattcaattggagtatccccatagcttccagtttgggtttgtttccttcaatcgtcagcactccgtaacccatcacaatcgtcccaggatcaatgcccaatatgacacggtctttcgtcatttctcccaatctatctcttccagtaaagtactaaagccggcaatcttatgaccgaaacgagcaaccaatgcgcggtgaaggttatttccttcattctgcaaccagaaattcaacgtatcgacattcttaacatgaaactggacggagaaactgatgccttctccttcttcagcctgcatcacacgtcgcaggcatggccgctgtaggaaaccgctctccacggctttcgggatatactgttttttcagataatccaaactttcatccagaatatctttttctatatggaacgttgtattataaacaatcatcttattttttataaaaaatctatggcaaagatagtggttatatcaggaaaagccctatatttgcgcttgaaaataagtcatacggggcattagctcatctggctagagcgtcagactggcagtctgaaggtgatcggttcgagtccgatatgctccacaaccttatggtaaataacaaaaaaggcattcatttctgaatgccttttttgttatttctatcttatttcttcgcagttgccaactccgtttcaatcggatcgtcgtactgttcctgcaatttattcagttcggttttcagactgtcgatcaaggcttcattgcccggttcattatagatattatgcatttccatcggatcgttttgcagatcataaagttcccacacatcgatatcattatagaaatggattaatttatagcggtcggtacgaacaccataatgacgttttactgcgtgttccgccggatactcgtaaaaatgataatataaagaagtacgccaatctttcggcttttcacctttcaacaaaggcaaataagaatcaccctggatatcttcgggaacagggacgcccgccacttgaaggaaagtcgctgcatggtcgatattctggaccatttcggggatgtcgcctttaacaccgccgggaaaacgaaccaacatcggtgtacggaaagattcttcatacatgaaacgtttgtcgaaccagccatgttcacccatatagaatccctggtcggaagtataaacgataatagtattttccaataaaccgcttttctccatataatccaacacacgccccacattacggtctacggaatggatcacacgcatataatcgtgcatgtactgttggtatttccattcagccaacgccttccccgtcaacttctgttccttgaatttcttaataataggatcataatgtttgtcccaagctgccttttgagccggagtcatccggttatataaattacggccattttcttcaaggccggtagtcgtatggatctcattttccttatctgccatcttcaagtcatagacgagatccatatccttgataatattcatttcctgttcggatgcggcaatacgcccttcatatttgtcataaaatgtttcgggaaccgggtaaacgacatcttcatacaaatccaaatcacaggtatccggcatccaggtacgatggggcgctttgtggtggagcaagagacagaaaggtttattcttatcacgtttgttatccagccagtccaaagctaaatccgtcgtgatgttcgtagcatagccttcgatctgctttttctctccgttatcgataaagtacggattataataatccccctgtccgatcaagatattccagtaatcgaaaccggtaggatcggatgtcagatgccatttccctacaactgcagtctgatagccggcttgttgcaacaacttcgggaatgtctgctggctgccgtcaaaacgtttcgtattgtcggtaaagccattcttatggctatgcttgcccgtcagcaaacaggcacgactgggaccgcttaaagagttggcgacgaaactgttcgtaaaccgtacgccttcattagcaatccggtcgatattcggagtttcgataaaacgatgatcgtaagcactaactgtctgataagaatgatcatcgcacatgatatagagaatattcataggcttctccgacaccccttttttgtccttttggacacaggcaggaagagttacggctaccaaacctgtcaaaagaaatagttgattagttttcatgatacattatgttttttgtctggatttggcaaaattaaacagagcgaacggaataatcactatccggactaaaaaatatataaaaaagtcccgaaactttattccgggactttcctttacctcttacctttcttatttgtcataatacggcaatttgtacggatttctgtattcgtaccagtacaaacgatgtgattcggcttccctatcgccattaaagctcaacgttgccggatcccaatgaacaggacgtcccagttcacgggcaatgttttgcaagcagcaaagcgtattcgtactacaaccgacttcaaccggagcaatcggattccggcgtgaacgaacgcaatcgataaagttctgcatatgcggagagcttacttcatattctcccttcccgactttcttttcctctttcggcaacaaggaaggatcggaacattcgatataaccgcgagcgactttcaaccaccccttatcgccgataaacttgataccttgcgcgttggcattatcttcacgataaggttgttcggtcatcacgataccattagcatatttcatcgtcgcatattctgtgccttcatatcctttcgggataaactctactggaccggagccgtccataccgatggccgcctgtgcaatatcgaacatatgagccccccaatcggctgtatatccgtttccggtttcctgataccagcgccatgccccccacaacttctcgttctgttcgggttcaagagagataggaggacaaagatcaggatgataatgaatcttcggatcgttcaacggtcccatccactgattgaaattcagattaccggggacatccatttccggcaagtccaatggcttggggggttcgccgacacgggcgtatatcttttcgatatggccgatcttaccggcacgaaccaacgcaatcgcatcctgaaactccttactcgaacgctgctggctaccgatctgaaaaacccgattattatcgcgtacggcacgagcaacagccagaccttccgtaatcgtataagccaacggcttctggcaataaacatccttaccgctctgacaagcatggatagcaaccaatgcatgccagtggtcaggtgttgccacttcaatcacgtcgatatccttacggtccagcacatcttcataaaattcatacatatcgcaacggggagctacattcagagacttctgccaagcctcgacacgacgtttgaaacgttcgcgtttcaaggaatccacgtcacaacaggcagcgacctgcaccccaggacaagtagagaaactcttaaaatcggataaaccttgttgccctaatccgacaaaccctaaaacgacacgatcactcggtgcgatacgcaccccatttacagcccagctgggcaggatagtcaaacttgccaatccaagagcggaaaggccgagaaactctcgacgggttacacccttcttagtgttttctttcatggtaattcaaaatatattggactaaaaaattattcggacaaatataggtattaaatatcaaaataacacatctatcccatctaatttgaatgaatagggcctcttttggaaatcactcttgcgggcaatattttttaacattctatttgatagcaaatttcctgattaaggtatcaaaatgacaatagaggaaagaaggtagaaaaaagggttcttttggtgtgattgccctatagaaaagatgtcgtttattaaaaaattatggctttccatttcataattatgaaatggaaagccataacgatatatcaaaatacgtttgtatcagaaagcgtagccgaaaccgacgttcaggtaaatcggatacatggcgaaagtaatcgtatcgaaatctttctgaaagatatcattcaatccccaagtcaggtctgcatagacattcaaatgcttaaaagcacgccattcggcacctaactgcgcaccccattggaaacggcgaaggtttttcgagaagtcataaggggcattttttccatcggcaaaaacgaccttattaccggtaggatcaccttcgcgcaaataaccatcatacacgtttccggaaaaatcaccctccaacatataggcaaaatacggtcccagattcatactgaagcgacgattaaactgatgagtagccaaaaccggaaaagacagatatgtattctttacattagtcttcacatatccagtccaatttccttttatgcgttcccccccttcaccgatgatttccattccataatttttcacattggcattcgttttcatccctttgctatccaaacgaataccgattctcattccccattttttttcttgatcgaaccactttgtcacattcccttctatcgcaacagccatagtaggattataccccgttatatcacgaatctcaacgggcaatggtatcggagccgttccccctatgttaaagccggcttttacctcatactccaaaccgatcaatgcagaattgataattcccttattccggtcttcttgtccaaaaaccgaaaacgttaccagcaacaaggccagtacacaaattgatacaatattctttctcatcacaataatcttttttaatctgctgcatgaatcagttccacttcatcgatatgcaatgtactgccgacagcacctctgaaataatccccttcaatactggaagaaaagacaatagccacattatatttaccagctttcagtttatctttatctacagtttttccagtctttgtcacaaatggcaaataaaactccgtccactcatccgtttccttccggtctttctcatcaatgcgagctatggatatcaaattaggatgatcaaaacggttcgttgcatccaatgtttttgtcttttcatctgtctcgtaaaagattgcataaatatcctacgtatcctttttatcttttacaatatttccattctcatctttataaacttcacctgccttatacttataataccccttcaagtaggtcggtatatgctcgaacggaactccgaacattgttgctttcaatgggtcggtcaatgcgttccctacactaaacgtacccataaaaagattaccggcagcaataggcatacccaacttcgaaccgaaatcccctgtcgactttgtttccaactttacgcatttgcccatttttccttccgcataagaagaagtcggaaatgatgccggatcttccgtacctgcaccagtcaaagcaaaaccggtatttccactggcccaatccattacccattttccctcagaatcattctcatagaaaatattataaacatatttcaaaagcgaactcttgtaatcctttacattctcaaaatgatattccgagctaattccggcaataatataagtaacttgatattctttcttccaatttccatcttcagaagttaccgtataaaattgcggagtcgtaaagtcacgttcggtcccgctggccggagaaatgattgcaccgggagtcaaggtaaattcaggtgcctgatgtgtcaaatcggcatcggccgttaccatcaatactaccttattattttctataattggatcacgtttcaagatatctcccggcactgtacaagtcaatatatccgcttctgcattcaacgcttcgtcacgaatacacgaaaccagcgtaattcccagcaaaaggcatacaataaaataagttactctaatcatcttatgtctgttttacaaataataggttttccttaaaaagcaaaccggatacaaaaatacgctccttttcccaaaaagccaccgtatttatatttttatcacagtttttattgtatcgctcacctattatttatacatttggctcaacaacttataatatctaattcataagaccatgacaacacgcagagattttatccggcaagcgaccttattaggagccggactttccatgagtccattctttatcaacgcgactcctggaagtgtaggagcgaacgacaaaatacgcgtcggactaattggctgtaaagggatgggattttcagacctacaagccttcctccggaatccggaagtcgagtgtatcgcattatgcgacatcgacgacgaagttctcaacagtcgcgcggctgaaactcaaaaaatcacaggcaagaaagttaaaaacctatataaagactggcggaaactgatcgataacaaagatatcgacgttgtcattgtcggtacacccgaccattggcactgcctgcagatggtagccgcctgtgaagccggtaaggatgtttattgcgaaaagccgttaggcaacagcattgaagaatgtaacattatggttcgcgccgccgagaaatacaaccgggttgtacaggtaggacaatggcaacgcagtgatccgcactggcaggatgccatggcattcgtacacagcgggcaattaggcaagatacgtaccgtccgcgtgttctcgtatcaaggttggtgtccttccatcccggtcaaaccggacgaacccgttcccgcaggaatcgactatgacatgtggctgggtccggctcccaaacgtccgttcaaccgtaaccgtttccatttcaccttccgctggttttgggattatgccggcggactgatgactgattggggtgtgcatctactcgactatgcactatatggaatgaacgttacagcccccaactctatcatggcttcgggaggcaaattcggatatccggatgacgcctgcgaaacaccggacttgcttcaaacaatttatacattcgatgacttcaccgtcatgtgggatcatgcaatcggtatcgacgacggagcttacgggcgcaatcacggcctgggatttgtcggagaaaacggaacactggttgtcgatcgcagtggctgggaagtaatccccgaaaaggtaagcggcaaagcccgcatggaagcggttccattgaagaaagcatatggtgaaggcggtttgaacctgcatgtcaagaaccatctggaatgtatcaaatcgcgcaaccgcaactgtaatgccagtatcgaaatcggcgcccatatcgccaagttctcccaattaggcaacatcgcctaccgtaccggcaagaaactgacttgggacggaaagagtttccatgacgcagaagcagacaaatatttatgcaaggaatacagggcaccttgggagtttccgaagatttaaaccaaaaggggttgtgtcaaatacaggcacaaccttttttatacaataacttgctcacgtaatggattatctatacttttgcttgaacgaaaaatcagaataggaacagattatgaagataacaatagaaaacgggaaagaaacagtcatcaatctttccggacaattggatacgttaacctccgtcgatcttgaaaaagagatcgctcccatcctgcagggggaagcgcaaacggtagtgctcgacggtgcggaactgacctacatcagcagtgccggactccgcctgctccttacactgcaaaaagggatgaagaacaaaggaggctctttccggctgaagaatattcagaatgagattatggaaatcctgaatattaccggattctctcacatcctcacgatcgaataacaagtatctttattccggcagatgacaaatacgctacatataaagaatgagctgaaacagctaacccgtctatacgcgtttctggaccagcaagccggtacttatgaactgggagaactacagtcgatgcaaatcaaactggcactcgaagaagccgtgaccaacgtcatccagtatgcctatcccgacaaaaaagaccaggacatccgtatcgacatgagctacgagaacaaacggctgacaatcgtcataaccgataccggcatcagtttcaaccctctcgaaagacaggagccggaccttactctctcactggaagaacgcccgacaggcggcctcggaatttatctggtcaagcaactgatgacggaagtcagctatagtcgttcagccgggaaaaatatactcacaatggcaaaagacatttgttgatatggcagacttcgacattagagatatagcagcgctcaaagtaaagctgcaaatcatagagaagctcgtattggccgactggatcttgattatcctgtcgatgtattacgactggggaggatggatagccagcctgatcggcgttcaaatcatcctgtatatctacaagacgaaactgcgcaagcaactgaaacaaaaagagtatctcgccaaagtggtcgaagagcgaacaatcgaactccgtatccagcgcgaccaagtgctgaatgaatccaagaaactatccgacgccctcgacgctctggcgaaagcacaggacgaactggtccgcaaggaaaaactggctactgtcggacaattgacgcaagggttggtcgaccgcatcctgaacccgatcaactacatcaacaactttgccggcctttccgccaatctgatcaaagacttgaaagaaaacattacggaccagcaggcgatcatgtcaaaagagaactacgccgacagcatcgagattctcgatatgatcaacagcaacttgcagaagataaacgaacacggctgcaacactgtccggatcgtcaaagcaatggaagaattgttgaaagaccgtcacggcgacgtcactccaacggacatctgcaacctctgcaaagtgaacgtagacgtgatccgcaagcagttcaaagaagacattgagaataagcagatacagatcgaactcgactgtccggcagaacccacgaccgcagagatcaacattgagcagatgaacaaagtgatgctcaacctactcaagaacagcctttacgcattgctgaaaaagttacagaaaaaggacttcacgccaatcatcaacatacacgtagaaaagagactgaacgggacaatcttcctctgcatccgcgacaacggcatcggcatcgaggacaacatcaaagccaagatattcgaaccgttcttcaccacgaagcccactgccgaggctgcgggtgtcggtttgtacctctgtcgtgaagtcatcctgaaccaccaagggtccatcatcgtaaaaagtgaaaaggataactttaccgagtttatgattacgattcctatttatcaaaaaagcaacaacaatgaatgaggacagtatgaaagagttagaacgtctgagaaaacagatcagccaacaggaaaagatggcttcactcggactgttgagcgcaggtatcgcacatgagatacagaacccgctcaacttcgtgatcaacttcagcaaactatcatgtaagttgctgcaagatatggaagacgtattggacgaactggaaagcaagctctctgccgaggtggacgaggagattagggaaatcatggacgacctcaaaagcaacatgtgcaagatcgaggaaaacggcaaccgggcatcgagtatcgtccgaggcatcctgctctattcccgcggcaaagacgatgaatatatagcgaccgacctctgccagctgacaaaagaatatgtatggctttcctaccatgctgtccgcgccaataacaagagcttcaatgttaccatcatagaagaatacgacaatacactcccgttggtcaaagtaatcccgcaggacttcagccgcgctgttctcaacctgatgaacaacgcctgctatgcagtcttcagcaaatccaaaggtgtcgctgaaaatccttatagtccgaccatcaaggtaagactggcaaaagacagcgaccgggtacggttggttatcgaagacaacggcccgggaatcacgaaggaggtcaaagagaaactttatacgccgttcttcaccaccaaaccggtcggagaaggaaccggtctcggcctctctatcaccaagtcgatcatcgaacaaaaacataacggaacgatcgagatggaatcggagccgaacgaattcacccgtttcacaatcaccattccgattaaataatcagagaaacaacgctactatggctataaaaatattaagtgtagacgacgaacttgacctggaaatattgctgactcaatatttccggcgcaaaataaagaaaggtgaatacgaattccatttcgcccacaacggactggaagcactccaaatgctgcttgccatgccggacttcgacgtgatcctgagcgatatcaacatgccggaaatggacggacttacgttactcacaaagattaacgagatgcgtaacccagcgctaaaatgcattatggtatcggcctacggcgatatggagaatattcgtagtgccatgaatcagggagccttcgacttcacgactaagccaatcaatctcgaagacctcgaacgaaccattgaaaaggcagccgagcagatcgctttcatcaagcaggcacaaagggaacacacacaattggaatccatccagaacgacctgcatgtcgcccaggaaatccagcaaacaatcctgcccaagacatttcctccgtttccggagttgaaatcgttcgacttgtatgcctatatgaacgctgccaaatatgtaggaggggatttttatgatttcttccgcatcgaccaggaccgcttgggcttcgtcattgccgatgtgtcgggcaaaggtgttcccgccgcaatcttcatggctatcagccggactgtgatacgtgccatcgcactgaccgaaaactcggcttccatgtgtatgcaacgttccaacaacattctctgccaagaaagcgtaaacgacatgttcgtgaccgtattctacggtatcctgaatatccatacaggtaccgtcacctacagcaatgctggtcacaacccgcctatcctgatgaaaaaggacggttccatttccaaagtgccacccactggcgacatgatattgggagcgatcaacgatgcctgctatcacgaaaaggagctgaagatgtcacccggcgacaatctctttctctataccgacggggtaacagaagcgatgaatacgaagcatgaactatacagcgaacaacggctgctcgaaaactgccggacacttgccggaaagaacccgaaagaggttgtggaaaagataaccgagacggttggcgaatttgtcgtcggtgctgtccaatcagacgatattacattgctttcgatcagttacaaagggtgacgaaaatgaattgaccaaattaaacgcacgagttgccaactcatgaaaatggattcccccaaaaaataaatatcccagcctccaataggaagccgggatacttatctttttatgtatagaaatcttgcttacttcagcaaagcatcgcggatccccatgatctcggcattagcagcacgagcgctctggatagaagcgaccttttctttcagcggagcaatcgtttcgcctaactgtttcaaatcaggatagtaagcagccaaatcggcaaccacctcttccaacatgctgacacgtttttccatatttgtagaaagaccggcagaagtagcatcaccttctacaaccaatgtaggattggcaaccaaacaagcatattcagcagaagcagcacctaacatttcaacttcggcatctactttgttttcggctgccatcttttcgatgatcttgtcttcctgtgcgttcaagaaagcttgcaattgctctttagttgcatctttcggagcctgttctttcaggatatccaaaacaaacgacacattcaagtccgtagccaacttggctattacgccttccacttcggctgtcggcttaccgatcgctttcaatacattataatcagccatatacatacccaatgcacgggctttctgcgtcggtgtactcaattcggcagccttaccaaccggcaccatatacttgatatcacccacatttacttttacttcacctgtagaaagacgataaggaatatcagaatccggcatatccttcaacaattgaattgtctcttgtttcaactcctcagtcaacagatctttcggagccttacctgctataacagcagcttcttcagtcttttcggcttcttcgcttgttttcttggctccgttgcaggaagtcattccaaacactaatgctgctacggcgagcatgcttaatacactctttttcatattgtataatttaataatttattatttcgagtcttaaaattcgtcccgtttcaagaaacgtcccggaaactctgcgaatatagcgataatcgacaataatgcaaagaaacctataaccaataaattaaatttataagtagaaatatgatatccggcccaatttttttcatggctgtagaaagcggcacgtccgaaacggttgtcaggctccacataaacttgcccgatcgctgggtagatacgatggttcgcttccttatatagatgacgtcctccagtccccataaccaggtcttctattgccatattatgatgggctttcttcatcttcatcagttgcccggtcccttctttccggccgcgttcctgctggatttgatcgagataggcagtgaagttgtgcgcccgttcgtgcaaagcggcatccactttgtccagatatgccagatatccctctccctccatgcggggagcgatacgggctgcacggctcaatacggccagctcgttctcgaccgttttccgcttatcgggatcatcttttagcgcaatctgttctaccaagctgcgcacctccggtaaatgaacgttctcgtaatattgcgccagatacttttctttctcaatcgggaaataaggacggttataagcgttgtcgcagaactgctccaccatcaacgcttcaaaagcccagcgcgaagggatcacctcgccgatcaacggcacgatgttctcatccgaagcccgtgtattgagatcgtcaaacttgatgaccaagccgcaaagcaatatctgtgggatcaacagaagcgggatcgtgatatagatcgcaacaaccgagctcatcgtctgcgaaaggatcagcccggtcagattcgccaggaacgacgttgcccacagaatgctccaccacgtgccgaacatctcgcttcccactccgataatggtattccccaccccgatgaacaaaagcgattgcagccccgacacagccaatagatacaccatcttggatgtcagatagctgctccggctcaaccgaaggaaatgttcgcgcttcaggatcgtccggtcctttataatctcctcggcactgatgctcaatcccataaaggagacaacaatgactgacatgaagatataagacacgaaattcttgttggcaagcaacgtatattcatccccgtccatatagcgggtcagaagggcgacgatcagcgcaagcaaaggggcttccaatagcgtgatagccagatattgcttattcgtcagcttcgtacgtatatttctttccaggaagatcaggaattgtttgaaccaggaaggtttcttctgctggttcttcggtaatgcttcctcctcgacaggcgaaaaagcgggacgggaagcaagatattcggcatgccattcctccggtgtgaactttcggatattcgtttggtttccagagtcgtcgatcttcttagagtcaatgatattcaaaatcaattcgggattcacattaccacagacactgcacacgctgatatccggatcagtatacttggccgcctgcttgaaataggtgattgcctctatcgggttcccgtcatagatcggatagcctcctcggtcaagtagccacaggcagtcaaacaacttatagatttcggacgaaggctgatgtatgttcaccaccaccaatttaccccggtgagtctgttccttcaggagcatgattactttttcggaatcggaagacgacaatcccgatgtcggctcgtcaagatacaggatagccggctcacgtatcagttcgagggcgatattcaaacgctttcgctgacctccactaatcgtcttacgaataggggaaccgacttcgagcccctttatctcttccaagtccaactccttcaaaaccttttccacacgttgcccaatctcctcgtccgtcaaacgcgcgaaacagagtcgtgccgtatacaaaaggttctgataaacggtcaactcctctatcagcaaatcatcctgaggaacaaaaccgatcaattggcgtgcatccggagagtcgagcggatggccattcacggtgatcattcccttatcgggacgaatattaccgttcatgattcccaacaatgtcgacttcccgaccccgctcccgcccataatggcaacaagctgtccggattcgagattgaaagagaagttatgcaacccgttatggctgttcttaaatgtaaaatcaatatcacgtccggccagatgaatgacctccttgtgttcgtttttattaaaaacagcaagcaggttactgtaatagaccggcaggaacaaaggccctttcagcacactgctatgttgccaggcataaaacatatccgacgaaagcggaatatcattcataaatacctgcccgttcccatgataggtgaaaatatgcttgtcgaagcgacggatatagagcacacggatgaccccttccatccctttccgcgtgatatggttgacctccgcctcctcctctccgctgatcgtcagcaaagacaaagaagtttgccctgtgataaaggcaagcgcatcatcaaattcttcctgagggatcgaaaaaatatcagctaccaggcggaacagagccagatgttgatccgcctcctcgctgttcgtataggcaaactccacgaaacggatcagcaaaagcaattgttcttcggctctcaactttactttcatctgttcgcatatattccgaacaatctgctctttgtccagtacaaagagcgaatcgtcatacatatcgcgcaatgcgttgtaaagttcaatatactctttatgggaacgtaccccgaagtggctggagagataagaatgaacggcacgacttgcctgctccctttcaatccgcacggaggaagcgaaaatagcaaatagatttaataaaccgtttaatatggtctcattcatttattttgtctgtgtaagataaattgcctgcaaagatagtaaagattcgaaggaaaaaacaaagaatatcagaaacgtaaacagccaaagttatacatgataccttaccggcactacctgaaacctctctcaggcaagcagccaactaacccgtttcatgccatcaactaagtcaaaacaccccaagaactaaatcagaacatatagtaaagtatctattggtagttactacctgttgcttatacgtagtactatctatcatcaattagtagttactacatattcgcaatagatagtaactacatataaataatatgcagtatgttttgaattagtttactatgactttcgaaatagtttatggcatgttccggaccagttactcttttagaacagacagattccgagcaaagtagcagaagaccaaaggtttcggatcataaggaatatatacaataatgtatagagaattttaaatgtcagaaaacattttatcaatagttatttttacggcttgggttactctctctgaactgcgccctaaagcctcacagataaaaaaggtattgacacctgatctctttaagactgtccataacgctttaaccaaattgtattcatatcagaaaaagaaatatccaaatgcttgttgaattttataagagagtgcatagtacatttatacatatccgcataacgtaaacgatttgctgattcaagttcttgaatatactggttaaagacctcttgtacagttttacgctttactggtttgttcaccttctccattaaagacgttgcagtaaattctttttcctgtgatttgaactctataaccttatctgtatagacttttactttctctgctattaacctttctatatactccttatttggacatttagaagttggtttgttggctttaaagtcccaatatttaggcaatatggaaataccaagactttgatatttcatttttcgatccttacaaacacgaatcatcaaaggtgattcattgtttttcaacactttagatttgtaacatacgacattgactgttgtactcatggtttaaacgctggtttaaacatcggtttaaacaaaccacgaaaaccacagaaaacaccataaaaaaagcagttacctaaaaagataactgcttgattttgtgagccgaaagccggacttgaaccggcgacctacgcattacgaatgcgttgctctaccagctgagctatttcggcaacatttacttcctgaatgcgggcgcaaatataatatgtttatttgacatctgaaagaagttttgctaaaaaatcatccaaatctgcatccaaatcttttaaaagaggatcatccaaacgaagattttcatcgtccaagaacagaagttcctcaatgacagagaaatcctcgtcagtcaggcttaccgagaacggtttcagaaaacaagggttatcaaaaactttttttgtaaccagaacggcaagcacagctttcaaagttgcagcaacctgttgagtaaattgatcatcatcacatgccgtattcacccaatcgaaaatgattgtcttctcaaccagcacatcctcttcatcataaataagcaattcaccactttcagcatctacctgcacatataaatcgctgtaacagttgccagcttcattcgcagcaagcttattgatggccgaattgaaagtcgtttctatgacagcctgaacctttgcattatttgcactcatatcttagttatttattctttattcgaaacgtctgccaaaagtaataataattcagagaatataagattattattctccaaattgcttatttagtttctgatctgaacggatacgcttgccaagagcctctacatacagccgttgcattttcgtgtaattataatcttcgccctttttattattaaaaatctcgtaagatttagcagcccagtcataggcatccttcaactgagtcttcatttcataaaacaaagccaagttcgatgcagcctttgcccgctctttccaacgtgaagaattttcatacacatgcttccaacgtgaagccgcttcctcccatttgtcagacaaggcataggcggtcgcttctttccaacgcgccccttcacctttatagaaccaacggctttcattatcccaatgaggaacaaagttcggagtaaccttcctaccaatatactgcccagcagcccgtaaagcttcatccggcgacggtaaataaagtttcaacaactccatattatccgcactttcagaccaaaaaacactatcctgcacgtaaacagtagccaacggattatcccgtccgggaagataaccacggacgaccccagtaatctcgatatcgactcctcccacgacaaagccttcggcaaaagcgacaacatccttttccatccggaacaacaggcgatcgagcgaaataacagcatccgtccctgtctcccggcacaattctttcaccgtttcgggtgtcaacttttcatccaccaaatattttgtatcctgacgagtgccatcatgatagagaagaacatcattgaagaaagagacatccacaatcgatttgcctaaggaatggcaggcatcatacaaagcactatccgcatgggcacgggccgtgtcctgcacagttccatataaattataggtatagccgacatcgtcgggctggggaacggcgttattaacaatcaaaaccttgtcgacattcttcgggaaagtaatctcggccggattataagtttctattccaatatattcaatggtgttgcacgccgaaaacaggcaggccatcaatagatacaacgttgttctcatctttacatttatgatttataatttatgaattatgcttcacaacttgtgcttcataaatcataaatcacaaatcataaatcataattcttatcatgccatatcactaacggccttgaaatagccgatagactctgcgataccgaggaaaggatctttcatgtccttttcgaactcaagactgcacattcctgtatagttcacctcgcgcatcatacgaatcaatgcggggaaatcgatctttccgcgcccgatctcaatgccgcgtccagcctttgaagaatccgtcacatccttaatgtgcatatcgaacacacgggtatgatatttcttcaagtcggcaacaggatcacaaccgttacgaagatcgtgaccaacatccagacacataccgatacgcgggtccaaatctttcgtatgttcccaaacgtccgttgcatccggataagtcttgatatcgggtccgtgcaaatggatcgcataattgaagtcgtactctttcactttcttgtccacatagggcaaaagttcgtaatttggtacgccgacaatcgttttcacgcctactcgtttcgcatattcaaaaccacgatctatttcagcctcgctcttcatatagataggaccgacagcatatccagtcacaccataagaagcgcatttgtcatggaaagccttgatttgatcgtcattgctatccaacggcaggtgaaaatccttgatacaaagataatgaatatccagacgctgcaaagtttttaacgtagtttccaagtcaaagtttacaaatgtatacccggccatacccaaatgaaaaggatttacggccttagctgccttaggcttcacgggatcgggcaatccggcctttgctacgcttgccgtacccaacaggatagctcctgccagccctttcttaaaaaaagatcttcttgatttctccatgatattaaattaaaattatgtgcttgtatattatgacagcaaatataatctttttttagtgtgcacgataacatttggaaagaaaatagaatactttgcaataattaattcatatcgtcgcaaagtcaactcccccaaccgcttcctccatcttttctccggcaggaagagccattaaaacagaacgcaaactatctgtctcattgtttgcattcaacaagacagtagtttgcgtcaataacataaggccaaccagaagaaatacttcatctggttatatttctgaaacctacttcttcaaagccgcgatgctttcttcgatagacttgattttactttctgcatcggcctgtttcttacgttccatttcaatgactttggccggagccttgcttacaaaactttcgttgcttaactttttcatgacagaagccaggaagccttgctggtatttcagttcatcctgaagcttagccagttcctcctccacgttgatcatattacccaatgggacagcatattccgtcgtacgcaccaggaaggaagcagaaccggccgttttttcttccgtacggatgatagacgacaaattacacattttggcaattacggcgttgaagtgatcgttgtgttcacccaatacctgcaattccaatgcttccttattcggtatatttttctgaagacgtatcgtacgcactccacccacaatttcttttgcaatttcgaaatcttccagatataagttatcaacaggagcaacctccggtatcagtgcgaccatcaagctctcgccttccttacgcggctccaacgcttgccacaactcctctgtaataaagggcataaacggatgaagcaggcgaagcagggcatcgaagaagccaagtgtcgataagtaagttgacttatcaacaggctgttgataacccggcttaaccatttctaagtaccaagaagagaactcatcccaaaagagtttgtaaacagccatcattgcttcactcaagcggtatttgccgaacagatcgtccatttcagcgatcgtcttgtccagttgcatcttaaaccctttgacagctgtggctgccgcttcgggctgttcgatagttgaatcaaccgtccatcctttaatcagacggaaagcattccatatcttattgttaaaattacgtccctgctcgcacaacgcatcgtcaaaaggaatgtcgtttccggcaggcgccgccatcatcaatcccatacgcacaccgtcagcaccgtattgctcgataagctgcagcgggtcgggagaatttcccaatgacttggacatcttacgacccagtttgtcacgtacgataccggtaaaataaacattcttgaacggcatcttaccccgatattcgtaaccggccataatcatacgggctacccagaagaaaataatatccggtcctgtcaccaagtcgctcgtcggatagtagtagttaatctcctggttgtccggatcgttgataccattaaacagagagatcggccataaccaggaagagaaccaggtatccagcacatcctcgtcctgacgtagatcagccatcgtcaaagaagcgttacctgtcttttcttttgctatttctaaagctttctctgccgtttcggctacaacataccccccttcgggcaggaaataagccggaatacggtgtccccaccacaactgacggctgatacaccagtccttgatgttttccatccaatgacgataggtattcttaaacttcggaggatagaacttgatgtcgtccttcatcaccggttccaaagcgatctgtgcgaggtgttccatcttcaagaaccattgcatagacaacttcggttcgataggcacattggtgcgttcggagaaaccgactttattttcataagcttccaccttttccatcaagccggcagcctccaggtctttttcgatctgcttacgaacatcgaaacggtccataccgacatacaaaccgccagcctcgctgatcgtaccgttatcattgaatatatcgatagaaggcaaattatatttttcgcccaacatatagtcgttcacatcgtgtgccggagttaccttcagacaacctgtaccgaactcgatatccacataatcgtcctcgatcacaggaatcacacggtttaccaacggaacaatcactttcttccctttcaaccaagtgttcttcgggtcgttcggattgatacacatggccgtatcccccatgattgtttcgggacgggttgttgcgacaatcgcataacggccttccggatcaccttccaccttgtagcggaggtaatacagtttgctgtgctcttccttatatataacctcttcgtcggacagggcagtcagcgctttcggatcccagttcaccatacggacaccacgatatatcagtcctttattatagagatcgacaaaaaccttgatcacactttcggaacgcaattcgtccatcgtgaaagccgtacggtcccaatcacaggacgcccccagcttacgcaactgcttaaggatgatgcctccgtgttcttccttccattcccaagcatgtttcaagaaatcttcacgcgtcaggtcagtcttcttaattccctgctgtgcaaggcgattcacgactttcgcttcggttgcaatggaagcatggtccgttcccggcacccaacaagcgttcttcccctgcatacgggcacgacggatcagaatatcctgaatggtattgttaagcatgtgtcccatatgaagcacgcctgtgacgtttgggggcggaataacaatcgtatacggctcacgaccatcgggtttcgacttgaaaaagccgttatccaaccaatactgataccacttaccctctacttctacggggttgtacttacttgcaatttccatattgtttcgttataattatatctatgttcggcacagacaaaagaagtccgctattttaagatgcaaaagtacaaaaataatatagataagcatataagagctaaattttatcagggcagctgcaccaaaattcggaaccacagcaaaaaagtatcctcaagcatgtagatgaactgacctttgagatctgaaatgttcaacagggcaagcattaccttgctatgcataaactagctttaacacatgacctgccccgaaagtgacgaagaaccaagttttctgcaaatcctctatcactctatcactacgaaggttgtagctattaatattcaagtgtcagaggcagtgatacaggacgttttcttctatcactcctctatcacttctgaggcatgtcgtttttatcatacaattgagaaccaacatattgtcttctattacttttgaaaaagcatataaaataatcgaataaataaatgtaaaaacgaatataacaggtattaaattggcggaatacggttcttcattccacaaaagctatctctttttttagcaaagacaagtacataattccgtaaacacccccatgttgccatcctttacatccgggtgtagagagccagtacacccggatgtaaaagggaacaacatggggatgtccggcaactaaagtaccgtgccggacaatgaaaaccgcccggttttacctattttacagccgtttttgcataaaataatcgagtgacttgcagagatggggaacaatgtttcagaagtgtatcaaataatcactgccggaaaactccgatttttccatcttccgtcagagtttcaaccgtaatccggggatatttacaacgactgttgttgtaaaaacggatataagcctttccctgttcatccgttgacaatgccggattccaataaagggtacgacgataatcattttctttcggcaatacgcgataatcgggctgatagaagtctttcacttcactatatccttccagccaggttttgcgtacgccttttccacctttcacagagatctgatcttccggataagtttcgatcaagacaacacaccgatataatttatcgatattgatcggtgtaaaacgcggatcggcataccggcagatcgttccaaagtcttcactgatataaacggatttaatcgcctctaaaggaagtaagcggtacttattataatccatttcattgtggtaggtacgttcgtaattgatcgcaaaaaggaccattcgccctttataaaaaagatattcctgcccgcctggactatgctcccgatagaactcagaattcatattaatcatcagttcatgaatatcatcgccgataaaaccattacggtcctgaatatcgtccatttcggaagcgacatcataataagcgatcgacttggtccgggttttataaacttcggcagctttatctagtttcttggccttaaccaccacttcatcgatccgatgaatcttttcgtccattcccagttttcgcagagaatcttcatacgccttgaataactgctccatgttttcttgcataaataccgtatcattcagctgtgtatcgggcaaagagaccttttcatcgcctgaaatatgcacctgcaattctgccattggatatctccgaggctccggatgaaacacccggtccagaacaatccgatgatctttcttcttccccttttcggaaacagatagaatcagattccattttccttccacctgagaaataaaagaaaaccgtcctgaactatccgtagtaaaaacatcgaagcaggatgtattctgatccgtcggattgtcttcctcgcctcgcttcgtcagaaaagaagttacttgcacatccggacgcggcttactacgaaccattgaaactacctggccgtgcagttcgattccctgctccggcagatacttcagttcaaaaggttccacaccggcccaatgcttccattcataacgcctccagccttgcaccatcaacaattcatccaaagcccgacgatgcaacgtatcatccgactcaaaataccaggaaggacggcgtacataccctttgatttccgacatcagcaacagatccgtcaacatcgaatgcctgctttccacttcttcccggccatcccggaccgacaccgacaagagcgtttgtgccggctgtccttgcggatcattcacttcgaaagaaatacctattgaatcatacggaagatactgttctttatccgtccgaacagccaacgacaaggtatccggctttccaacaaaaaccaaccggtcagccaaaacctgtccggctttatcaaacaagaccagttgagacacacctaccggtaaattcttcttatccagtcgaaaagagaagggctgattcctcttgaccgtcagcatacagaaattatataatttacctcggctcataaccgctactcccaatacctgagccgccgtaaaatgattcttctgtaccgtaatagccaaactatccgggatacttagattgtcaaccgaaaaagcgaatccctgttcctctgcttccggtaaagaaaagcgatatttcttgtctcgccaaacaacttccgcctttacttcttccgtatcagccacataggtaaaaacaccttttccttcgtgacttgtccggaatgtcgaaactacctctttttccttattcaggatacaaccggagacatccaccggattaccgaaagcatcggtcgcttcaaaggcaacccgcaccgggacatcgcgaatcaacgttccgccctcaggataaaagcggagattcagtttcttttctttcctggtcttttcccttttctgcggatactttcccggatgtcggcaaatttctttttgggtataatcgccttctgaatctggtttgtcgaacaccgggaaaatacgtgagaagactgttgcctctccaaagttcaacatatatttggtataagcacgtacctcataaaaaccggaatagaaaggtaagtgcgtcaacgtaaaattcccctggcaacgaccgttgcggattggtaaaatctgccgggagacaatctcacctccaggattcagtaattccacatacaacgtcttgctccacgctgtaggccgattgaattcggaagtcacgacataacactgaaaccaaatctgatcgccctgataatagccggtattatcaaaatgcagatataccttttcctgaggcaaagcctttccaaactggtctaaggcagagacaaaaccctgtaagcggacagcaatactgtccggaatcggatatgcgtaaaccgaaacaaaccaaagaaagcccagcaatccgatacctcgtcttataaacttacataaagacatcgtcgtttatttaatcgcttcttccaattgtttcttcagttcttccatcttctccggcgaagccgctactttctgacgtatctttccatctttaccaatgattacgcaatgtggaatatacaaggctccattcgaaccaaacgtatcataaatttcctgcttgaaagcctcttgaatgcgaatatgttcccctttcagatcataatgagcagccatcttcttccatttctcttcagcttccggattatcaatcgagagatacagcaaaacaatatctttttcctgagcatattcctgcaacggctttacaaaagcaaaggaatcacggcaaggaccacaccacgttgcccaaatgtccataaagataactttccctttatacggtgcgataatatcctggaaagttttcgcctgtgagacatctgggaaatgaagatcttccagaatccgggtttggttaaatgcccggttcttttccattgcttcctgcaccagcggttgccaggaagtttccggatataattgcaggaaacgttcggcataaaccggcatcttcggatcgttcatctgcctttcctgatcttccaggaaaagctgggccatggctgcctcttgtgccttgccctgtaaacgatgttcaaaatcgtaatacatcaaaccgatacctttttctacaccttccggaatcgattcctgacgcatataatatcggataccaatttcattggaagccacatcgtaaaaggccggactgaaagtactgttcggattatccgggatacaaaaagccgtcatctgatccaactcagtaaaccaattctgccttgtcgcttccgatgcctgataaaatgcacccatcgtctggttctgaaaagccagcaacaactgcatccgtatatcttgccgggctttttcctgtaagtcttcatccaaacccgtcaattgcgattccagagagactgcatcatctttcagtttttgggctacagatgtcgctacagtatctttagcaatctgccaacggtcgccacggcgggcacgcaaatcccaaacagcggcattcagtcgattgagcaatcgggaaacggctaccgccttctcatccactccccggatagtcaaaggttcttgagccgttgcatctacatccaattgtatttttcctcctttcgatataaccgaacccaataccgcttttccatacaaaatgaaattcacccgttcataatcttcaaccggtaacgtcaatgtaaatgtactatcgctttggatttgtaacgtatcgatcgttttcgtattcatcatgcctgcgatagattgctggtaaacgatcattccgccgttcaagttccgcacggttccggtgatttggatttctttctgatccgaacaagacaatagggctgttcctaaaagaagaacacaaacggacttcggcatttttctactccaattcatggtatctctatttcatggcttaaatttagagcctgtttaaaaatgattgaaatctttttctaaagaagtttccgtattagtcggattatttcttttttaaagtgaccaaacttaaaaaaatgtatcaaactgatttaacggaaaccgagtgcaatatataacaaaagtgttgaacctgcaagaaagaggaaatatgattcgcgactgatttggaacgccatattttatttagttaagaccggttgtcaatagtggatgcttcccctagacttttccaggtggcagttggtctattactactatcgtaaatgggcttcccaattaaactttggtcaccatagccaatatgcatgacagaaaagccacatacttactgataacagagagggaattcctaaataaatacaaagaaaaacagtaacagccgatttattttatttgtccgcatctccttgcagcattgaccaaaagcctgtatctttgtaaactatatataattaggaatatggcaagacgctcagaatacagaggcacagatagatccagagcccctcgaggacgtaaagttacagtgaaagaagagaatacgttacttcctttcctgttcggtcttttaaacgaacaaagtaaaagttcagtcaaggcactactcgcccacggacagatttcagtcaatggcacggtaacctcccagttcaacacgccgctcacaccgggcgacgaggtgttaatcagctacgaacggggaaaagtcgagttcaacaatccactgctcacaattgtttgggaagacgacgacctgatagtcgtaaacaagaaagaaggcttactttcggtttccagcacgcgcgtgaaggaacggacagctcttcatctgctcagcgaatatgtcaagaagacagatccacgtaacaagatattcgtgctccatcgcttggaccgcgacacttcagggctgatgatgttcgccaagaatctgcaagtgcaaaaggcattgcaatcgaactggaactctgccatcacggcacgcacatacgtggccgtagtggaaggacgccctgagaaagattccgacctgatcgtctccaacctgaccgaaaatgcaaagatgcaggtgtatgtgacagctgaaggagacgggaaagaggcgatcacccgctaccgcctgctgcacagcaacggagcctattcgctgttggagctcgacctggagacaggacgcaagaaccagatacgcgcacagatgcaatcaatcggacactccatcgccggcgattacaagtacggtgcggagacagatcctaccggacggctgatgcttcacgcccgacggctcaacttcattcatccggtaactggcgaagagatgcatttcgaaacacgcattcctgacaaatttacctctttagctaaataacaaaaatagtaaaaataatatgaagaagctctttagtaccttgatgttggtgctcgtcgcactgaccgtacaggcacagattctccagcctgtaaaatggaagatacaactgaacgactccggctccgcagagaaagagatcgtttttaccgctactgccgataaaggctggcatttgtatgaccaggacttgccggaaggaggccctgtctccacttcgttcacattcgagacactgaaaggagccgagctgatcggcaaaccgacttcatctgtcaaaccgaccaccgtatacgacgaactgttcgccatgaacctgcgttggtatccggggaccgtttcgttcacccaaaagttcaaagtgactgacccggccaagttcaaagccgaaggtgaagtggaatttatggcttgcaacgacgagacttgtctgccccccgatcgcgtcagtttttcgttcgacaaaaagaatataaagatgacagccgccgccgaaacagtggtcgaaaaaccggaagtcgaacaagacgatgtgacagccgtgcagccggatactgaaaaagtggtggaagaagtggccgagctgaaggttcccgcccctgttaccaacaaagacaaagcagagaacaggccagtccgcgcctccaacgagctgaccgacgacgctgccctctggactcctgtcatcgaccagttgaaggcattcggcgacacgacggtttcagcaaccgacacatcttggttgttcatcttcttcgccggtttcctgggtggattgatcgccttgctgacaccttgcgtatggccgatgatcccgatgacggtcagcttcttcctcaaacggacgaaggaccgcaagaaggcgatacgagatgcgatgacgtacggactttcaatcattgtgatttatctggtgatgggattgctgattacgggtatattcggggcaagcgcactgaacgacttatcaacaaatgcgatcttcaatatcatattcttcctactgttagtagtcttcgccatctctttcttcggggcattcgaaatggtattaccctcttcctggacgaataaactggacacgaaggcggattcgacgacgggcattattagtattttcttcatgtcgttcacgttggtgttggtttccttctcttgcacaggtccgattatcgggactttgctggtacaggctgcttcgatgggaacggcggtaggaccggccatcggcatgttcggtttcgctttggcattgtctattccgttcagccttttcgccatcttcccgaacatgctgcaaagcatgccgaaatccggaggctggctgaactccgtcaaggtggtgttaggcttccttgaactggcactggcgctgaagttcctttcggttgccgacctggcttacggatggcgcttgctggaccgcgaagtgtttatcgtgctttggatcgtgatctttatcctgttgggttgctacctgttgggtaagatcaagttcagccacgacagcgaccttccgtacgtatccgtgccgcgcctgttcatggcgatcatttctttctcttttgccgtttatatggttccgggcctttggggggctcctctaaaagcgatcagtgctttcgctcctcccttgtacactcaggatttcaacctgtacaacagtgaagtgcatgctgcttttgacgattacgaaaccggtatggcttatgccaagaaggtgaacaagccggtcatgatcgatttctccggtttcggttgcgtgaactgccgcaagatggaagcatccgtttggaccgacccgaaagtgaaacagatattggaaaatgattatgtcttgatcaccttgatggtcgatgataagacgaagctgccgcagccgattacaatcgaagagcatggcaagactcgcaaattgaaaacaatcggcgacaaatggagttacttgcagcgtagtaagttcggtgcaaacgcccaaccgttttacattctgctgaataccgaaggcgaaccgctcggcccgtcgtatgcatttaacgaaagtgtccccgactatatcaaattcctggaaaatgggctgaaggtatttaaagaacaagaaaagaataaataacatcttataggctgtgtgttaaaaagatagagaattcaatctcttgccggggaattcatcccccggcaagagaaagatgaaatttgacacacctccttcctctccaaccaaacaactaaaaatggcaacaaaacaagaaaagatggaagccttcggacagctgctcgacattctggacgagcttcgtgtgaaatgtccgtgggaccgtaagcaaacgaacgaaagtcttcgcacgaatacgatcgaagagacttacgaattatgcgatgccatcatgaaagatgacaacaataacatcaaaaaagaattgggcgacctgctcctgcacattgtcttctatgccaagatcggtgaagaaaaagcggcgttcgacatcaaagacgtgtgcgacagcctttgccagaaactgatctaccgccatccgcatgtcttcggaaacgctcaggccgaaacagccggcaaggttgaacagagctgggaacaactcaaactaaaggaaaaaggcggcaacaagacagttctcgaaggtgtccccacttcacttccttccgtagtcaaagctcaccgcatccaggacaaagcccgcaacgtgggtttcgactgggaacaacgcgaccaggtctgggataaggtgcacgaagagtttaccgaactgaagactgaaatcgacaagatggatgcagataagatggaagcagagttcggagacctattcttcagtctgatcaacgcagcccgcctttataagatcaatccggacaatgccttggaacgcacgaaccagaaattcacccgccgtttcaactatttggaagagcatactatcaaagaaggcaagtcattaaaggatatgtctttggaagaaatggaccggatctggaacgaagcaaaatcgaaagggttataaaaacaaaaggggaaccgacatcacgtcgccacccctcccttaacttaaacgccaaaactaaatctaaacaaaaaacacaaataatgataatattttatttctttctattctcttcttttctatcgtctcctcctctcataaattctcgcgcaaactttccttccgcacgtttatatctataaagtttctttggagacaatatctttttaaacttttcataatactccttttccaactgtgcctgccttatgttcacgctcacacactcatcaatcaccttcaggtaatcagcatcggtcgcattttcattatgctttaaatctttggatagtttacgacattcacgaccggcctcaaacatcttttcttgcagttcgttacaaagaggtataaatgatgctgcctcttccggggttaaccccatctctgccgtaataaaagcattcttcttagcaaagaacgcttctctatcaaaattgcgatgctgtttcccactttgagcgtgagcactgaatgagaacacaactgaacacgccacaaatgtaataaaaaatattttattcatacaagcattctttcaaaaatattttgtcaaacttcattttttttcaatttattcggtttcccctatttcttctgccaatatataaccggcatattgctcttccaggtactccaagtattcttcatcctcggccgcttgcaaagcagaaactgaggctggagacacttctgtttttacgagtagcgggtcggttttcgccgctttatcttcgggtccgaccaaaactttaaaaaacaaccccaatccggcaaaaacggctgccatatataaccagggacgaacacgatccatcaaggaaacctttttcacctcttcttcaggctctctttcgggaagctgactcataatgtttgccgtcaatccctccatatacccctcaggtacagtaaaaggatttttccctttaagacggtccagattgttttgttctgttttcatatcatctctcttttatgttcttttgacaaatggtaacacgaaaggtttaaatgtcttttgttaaaaactcctctactttcttcaccgcatgatgataggaagcttttaaagcgcctacggaagttccgaaaatctcagacatatcttcatatttcatatcgtcaaaatatttcatattaaaaacggcacgctgtttctccggcaatgtcaggatggctttctgcagtttcatctgtgcggcatccccgtcgaaatattcgtctcctttcaggcactccagcaaaaacacgtccgtatcgtcaatcgagacattgttctgcatacgctggcggttcagaaaggttatacattcgtttatcgcaatcttatacaaccaagtcgacaacttcgcctctccccgaaaatagtcgatattcatccaggctttcaggaatgtattctgcaataagtcgttggcatcgtcatggtccaacaccatctttcgtatctgccaatacaacttctccccgtagaaattgacaacctgcgcgaaggcatcacgttgatgcgccggatcacgtaattgttttattatctcttcctctatatattgttgcattcctactcactaatttggggtaaatataagaaaataatcattatctccttccgttccccttctataagagacggaaataatggttcaaagtttaatcgaacctcataagggaatataaaaaaagcggacaaccatataagtcatccgctttgaagtgcccagaacaggactcgaacctgcatgcctctcgacacacgcacctgaaacgtgcgcgtctaccaattccgccacctgggcaattcagcacttttcagtgaatcaatctctcttgattgcggttgcaaaggtagcaacttttttgaaactgccaaactgtaaccatactttttaaataaaaaaacggccacctccctttcgggaagcagccgtttcagattttatgcttatgggaagaattacatcataccgcccatgccacccatacccgggttcatggcaggagctgccggagcttcttctttcttttcagcgatcacacattccgtagtcaggaacataccagcaatagaagcggcattttccaaagctacacgtgttaccttagcagggtcgattacaccggctgcacacaagttttcatacttgtctgtacgggcattgtaaccaaagtcacccttaccttcttttactttctgaacaactaccgcaccttctttacctgcgttagcaacgatctggcgcaacggttcttcaatagcacgtttaacgatttcgataccggttgtttcgtcttcgttttcacccttcagaccttccagtgcttcgatagcacggatataagcaacaccaccaccaggaaccgtaccttcttcgatagcggcgcgagttgcatgcagagcatcgtcaacacggtctttcttttctttcatttcaacttcagaaggagcacctacatacaatacggcaacaccaccggccatcttagccagacgttcctgcagtttttctttatcgtagtcggaagtcgtattttcgatctgagtcttgatctggccgatacgagcctggatagcatccttatcgcctgctccgtttacgatagtagtcgtgtctttgtctaccgtaaccttttcagccgtacccagcatatccatagtagcaccttccagctttaagcctttttcttcggagatcacaacgccacctgtcaggacagcgatatcttccagcatagctttacgacgatcaccgaagcccggagccttgacagcacagatcttcaaagaaccacgcagacggtttacaaccaaagttgccaatgcttcgctatcgatatcttcagcgatgatcaacagaggacgaccgctctgaactgccggttcaagaataggcagcaaatctttcaatacagagatcttcttgtcgtagatcaggatatacggattttccatctcgcattccatcttttccgtgttggttacaaaatacggagagatataaccacggtcgaactgcataccttctaccacgtctactgttgtttccgtgcctttagcttcttctacagtgataacaccttcagtttttactctctgcatagcttcagcgatcagtttaccgatagcttcgtcaccgttagcagaaatcttggcaacatgctcgatcttttcgaactggtcaccaacagcttcagactgggcagcgatgctttctacgactttagccaccgctttgtcgataccacgtttcaagtccatagggttggcacccgccgttacattcttcagaccgacaccgataatagactgtgccagaactgttgcagttgtcgtaccgtcaccggcattgtcgttagtcttggaagcgacttccttaaccaactgagcacccatgttttcaaacgggcaagcaacttcaacttctttagctaccgttacaccgtcttttgtaatgtgcggagcaccgaatttcttttcgatgatcacattacgtcccttcggacccagtgttacttttactgcgttagccaattcatccacacctttcttcagaaggtcgcgggcatccatatcgtatttaatttcttttgccatgatttctatcgttttatataaatgtataaatatttcttaattgtcaattatccactatcaattgtcaattgtttagataatagccaaaatatcagactgacgcatgataagatatttttcaccgtccagttcgatttccgtacctgcatacttgccgtacagtacagtatcgccattctttacaaccatttcttcatcctttgttccgttacctacggcgacaacttcaccttttaaaggtttttcttttgctgaatcgggaataatgattccgccaagtgtcttttcttctgctgcagcaggcttaatcagcactctgtctgctaatggtctaatgttcatcgttgtatattttttagttgttaataatattacgttaatcttgtgctttacttatcgcacataaacgtctatgcgaatactgtgccaaaactgttgtcaggaaaaagactgacaattttgcattttagaaagacagacaatacaaatatatctgacaggatgaccatcctgttacaaaaaaacttccccattacaacaagaaaatgaatggggaagttcaattatcagtctatttatagtagaaacgggtgtacctaaaggcacaaaattgaaattgcagctagaatctttcgatcagttcttctaatgtgacaagagactgttcgcctgtcaacatgtttttcagattgatcttgccttcatttatttcgttttcaccgacaatcgccacaaacgggatctttttcgtatcggcatatcccatctgcttcttcattttggctgattcaggatacaactccgtacggataccggcagcacgcactttcgagatcagaggcaataaatagttttcttccttctcgccgaaattcacgaacaacagttgcgtggtcttcaaagaatcaaccggataaagttccaactggtttagaacatcgaaaatacgatcggcaccgaaggaaattccgacacctgacataccgtccataccaaacacaccggtcaaattgtcatagcgtccgccccccgtgatacttccgatctggacatccaacgctttcacttcgaagatagcacccgtatagtagttcagaccgcgtgccaacgtcagatccagttccaaatcagctgtcaactctaacttctcgatgcggtccaggataaattccatctcggcaatacctttcatcgctatttccgatgctgccagttcctttttcaaaatagccagcttttcacgattcgtacctttcagcataatgatcggctgcaaacgggctatcgcaccttcagacaattctttagaacgcaattcatcatttacattatccagaccgatcttatccagtttatctatagcaaccgtaatatcgacaatcttatcggcttcaccgattatttcggcaatgccggaaagaatcttacggttgttcatcttgatacagacacggattccgaaacggcggaatacctcatccataatctggatcagctcgacttcatttaccaacgaatcggaacctaccacatctccatcacattggtaaaactcacggtaacgacctttctgcggacgatcggcacgccataccggctgtatctgataacgcttgaatgggaaagcgatatcattacggtgctgtaccacataacgggcaaaaggaaccgtcaggtcataacgcaaacccttctcacaagctttcattccgaatcttacggcattgcgctccgacagttcttcatccgttattccggaaaagcaatcgccggaatttaatattttgaaaagcaacttatcgccttcttctccatacttgcccatcagcgtagacaggttttccatagccggcgtttcgatctgctgaaatccgtacagatgatatacttcgcggatagtattgaatatataattacgcttcgccatttcttctggcgaaaaatctcttgttcctttagggatagacggcttttgcatgattcactaatttatatttatttaggctgcaaaggtaatgcttcctgtttaatcccggcttcttccccccaggaaaatcatgatataatataataatgtagcaagcgaacccaaggcagccactacatacgtgtaagcagcagaacgcaaagcatcttcagccttgtcatgcgtatagacatttgtgatgccggcattgctcaaccataccaaagcccgctggctggcattgatctcgaccggtagtgtaatgaaactgaataaagtcgtcgatgcaaaaagaataataccaaacagcatcaactggggaaacgtattaatcaacagcatgccacccaacagcacccatgtcataatgttggaagcaaagctgacgaccggaaccaaagccgaacgcatccgaagaggcgcataagccgtagcatgctggacagcgtgtccgcattcatgagctgcaacggcagcagcagcaatactgttactgtaataaaccgattcactcagattgacggtctggtttgccggattataatgatccgtcaaatgtccgggagtggaaatcacctttacgtcataaatcccgttatcatgcaacatcttttcagccacatcctttcctgtcataccattcggcataggaatcttggaatatttttcaaacttgttctggagtctggaagaaaccaaccagctaagaagggcaaaaccgataaatataatccaatacatgctcatatttttctaatttataatagttatactaaatcataaacgacaaaaagtctgccaaaaataaaaatggcaggagatcatccttccgggatgtggtcttctgccattttgtattattttcaggttttattcttcggtatatctgacaattgtttgttcacggtcaggaccgacagatacaatcttgatcggaacttccagctcttcttccaagaaagagatgtaagcattgaactcttcgggaaattcgtcttcactttgcattttcgtcatatcgacattccaacccggcatttccacatatacgggttcgatgccctcattgatttcaaacggaaactctgttgtttcttcgccattgactttataagcaatgcaagcctttactgtttcgaagccatccagcacatcgctcttcatcatgatcagtttcgtcacaccgttgatcatgatcgcatatttcaacgcaaccaagtcaatccagccgcaacgacgttcgcgtccggttacagcgccatattcatgaccgatctgacggatcttgctgcctgtttcatcaaacagctctgtcgggaacgggccgctaccgacacgtgtgcaataagccttgaagattccataaacttcaccgatgttacgcggagaaacccccaaaccagtacagcaaccagcacaaatcgtattggaagaagtcacgaacggatacgaaccaaagtcaatatccagcatagtgccctgtgcaccttcggccaaaacagacttgccttctttcaaatagttattaatcacatgttcgctgtcgatcaaacgaaactgtttcaaataatccaaagccttgaaccactgtgcctccaattcagtaatatcatattcataattcagagaatgcagaatcgcttcatgtcttgcttttgcagctgcatacttttcatcgaaattatgcaacaggtcgcctacgcgcagaccgttacggctgatcttatccgtataagtcggaccgatacctttaccggtcgtaccgattttgcctgaccctttcgcagcttcgtaagcagcatccaatatacggtgagtaggcaagatcaaatgagctttcttagagatacacagttgtttggtcaggtcgtgcccgctggcagcaagtgcttccgcttcctgttggaacaacaacggatccactacgacaccgttaccgataacgtttaccttacccccttggaaaataccggaagggatggaacgtaacacatacttttcaccgttaaattccaaagtatgtccagcattgggacctccctgaaaacgagttatcacatcgtaattcggagtcaaaacgtcgacaacttttcctttgccttcgtcaccccactgcaatcctaatagaacgtcaactttcatcgtttatatattatatagatgttaatattcttacttcttccgctgaagccggtacttacatttgctacataagccataaatgtaaagcgcatgatattccggagtgaaacgcgatatcttcaacgctccgacatctttcttcagtgttgcatccttctgctctctgattgccccgcatttcatacagatcagatgcaagtgtgtctccgccagcatccgtaattcatactgtacagcctgggccgtcagctgatgacgcacaattaagccgctgtctaccaaaacgtcgaccgtgttataaacagtagcccgactgacatgaaaattcatttcctccagtttctgatgaagcaaacacatatcaaaatgaccggggaaactgcatatacactccaatatggcatagcgttcctccgtctttcgtagttttttctcggcaagatatctggtgaacaggtcttgcatctctgtgtacttttttgcatccatcttcaagttgcgactccacgcgaccgacaaagttagcgcatttattttaaacgcaaagccttaacggcaatattcaaattcaaattttaaatcattatatatttcctgcccttcgggcgtctgcatgaattcaggaaaatcatcgaacccgcccaacatttgctgcgctcgttcagccgactgtcttccataaaatttcatggctttcaccgcagcctgcttttctttgaaggacgcctcgaaatcagtctgggcaagcgtccgcatacattctgcgacaaatgcggtcctcaccggtgctatcaaatcctttccttccttaaacagttcggcccagacaagataagccaccgtacgtgcatattcgtcttccacattaaaaatcaacccgagcagcaaatcctccacatctggcaacttataaaacaaattgtggctgcactgctctgcaatttccaaataaggtatttctttcacccattgcttcgcctcttgggacgagaactcgtctaccggctgcaagaaagaagccaatatcttgaattcacggatgtcttctttccacaaggcagcggccaactcagagtccggtttatgcgtagtggcaatctgcttgatttcgggcagaggaacaccgaaattaagtttatagacaatgcccttctcccgcatgctggtagagatcactccattcatcgccaggcgaagctgggtccgtatttcttttaattcattctgtaacatacgctttattattcattataggaaggtaaaaacgaatactccttgctgtaacgaagcatctgatcggtatacccttcggtataatccagcacaatatccgttacatctcccttatcgttcttgacttccttcatcaccggattcacgaatcccttatacggagccaggttcaatttggcatagcgttcgagcacttcggcatgaagagctggggcgacctttacggcatactcttccaccagtttctttccggcagaaaaatcaccttcactcttgatacgctgcacttccgccaacaaagttccgaacagttcacgcagcttggcatagtcattgaccaccacgtatgtcttgccatcccgctgtttcagttcaatcacgttatcagcctttcctttttcatatacccatttggcaatcagctgacggttgcgcatatgggcttcttcgacattcttgccctgctcgatccggaccagctgtgtcatcaggccattcattatatatttatagtattcagccttataagcctctgcatccggcacaagtccgagttccaccagcttggcatctccaagatagtacaaaccgaaaagatcggcacgcgcctcttccaaagtcgaactgtaggccttcaaagcatccggatcggtatcgggaagcaatttaccggaaccatgtcccaagcattcatgcaaatcggtatgcagattgtcggtgatgaatccgtatttcttcaatccttctcgctccttctcactccagacaaattcctcattgaaaccatttccctgagaagctttgtcgtatgcctcggtgatattctcgatcgtaacggatttcgaaccatgatcgcggcgaatccagtcggcattcggcaagttgatgccaatcggagttgccggatagcaatcacctcccaacatggaaaccgtaattactttggcactgactccttttactttttctttcttaaaccgtttatctacaggagaatgatcttcaaaccactgcgcattatcgctgatcacttttgttcgcttcgttgcctccttattgataaagttcacggtcgactcccagctggctttcattcctaacggatctccgtatgtttcgataaagccgttcacaaagtcgacatccgatgccgtatcttccacccataggatcgaataggcatcgaagattttcaagtcgccggtctgataatattcgatcagtttcccgatgattgacttttgcgcatcgttctcggcaaaagccgtggctttctgcaattccgacacgatcttttcgattgccggcgaatagaggccgcctaccttccacactttttcgaccaacttgccgttctcttttaccaaacggctgttcaagccgtaagagatcggagaaatcgtgtctttcccagctttcatccgggcatagaaatcctcaacttctacctgggtaactccttcgccataataattgttggccgaagcccagatcaggtcgacatcaccactctgcaccgtacgcttcgccatcacagccggatcaaagatcacgggactgatctcggcgacaaactgttccaccgtctgcccttcacgtagcggaagtgcggaagcaccgatctgcgagatacaagtccggaggaactcaggcgtaaagccgggaacaaatttgtcttccgcataatggtgatggatgccgttggcaaaccaaacccgtttcagataagtttccaaagcaacaaactgcggatccgtacgatctcctttatagccgatataaacagcctccagcgcacggcggatcggcagattataacgacagttctggtcgaacaaaatatcccggcccatcagggcagcttccgacaaatgatataataattgtttctgcttcaaagaaagggattcaaatcccggaacctgataacgcaatatctgaagatcagcaaactgatccacgacataattgaaattatcctgagtagcttccgccttctcagccttctgccccgtacaggcagtcataaccattgcagtcataagcgataacattatatttttcatatactaacttttagcttttcctaatattattattaaaaaggttttctcgcaaaggtacagatatttcagaaattatactagtcatcttcctttattgcaatctgaatacagataacttataaagcagaaatatgagtagatttgatttttttattccaaggacatagaaagagaagaaatttaataactttgccaatagtaatgttgacataaaacaaaacgcgatgaaaacaaacattcctgaacgtattgccgccctaagggaagcaatgaaacagcataaaatcgatgcttatattattccgacttccgaccctcacatgagtgaatatcctgccgactgctggaaataccgtgaatggatttccggattcacaggttcggccggaacagttataatcacagccgataaagccgggctttggaccgactcccgatatttcctgcaagcctccacccaactggaagggacaggtatcgaacttttcaaaatgatgttacccgaaaccccgacaatcccggagttcctgacacacgaactgaaagagggacagacagtcggcctgaacggcgagacatacagcctggcagatgcccgctcactggaaaaggcattagcggaaaaagagatcaaactgaatacaaacgcttcgctgatcgatccgatctggaaagaacgtcccgccatccctgaagctccgatgtttgaaatgccgatcgaactcagcggaaaatcaacagaagacaaactgatagatatcaacaagatgctacacaaggcaggagccgactgcaccattctctccgcattggacgaagtggcctggaccttcaatatcaggggtacggacgttgcctataatccggtcgtcatcagttatgcattcgtttccgagaaggaaagcgtactgttcgtgaatccgaagaagatccctgctgaaatagcagaacatctaaagaaagaaggagtgacactagccgactacggcatgttggcaaccttcctgtcacggctgccggaacagacacgggtgttcatcgacagcaaacgaaccaacgtagccatctacaatgcactgcccaaaagcagtatcctgatagaaggaacctcgcccgccaatcacctgaaaagcatcaagaacgagacagagataaaaggattccgcaacgctgtcctgaaagacggcatcgccatgaccaaattctatttctggctggaaaagatgcttaaagccggagaaaaggtgacggagctgagtgccgctgccaagttgacggctctgcgctccgaacagccccaatatgtcatggacagctttgccagcatatccagctacggtcctcacggagcggtcgtacactattctcctacacccgaaacggacacggagttgaaaacggacagtttgtacctgctcgactccggagcccagtatctagacggaacgaccgacatcacccgtacgatcgccctttgcgacgagccgagcgagcaaatgaagaaagattttacccgcgccctgaaaggcactatcggaattgccaaatgcaaatttcccgcaggtatacggggctgcctgatcgacgctttcgcccgtaaagctttgtgggatgccggcatcaactatctgcacggaacctgccacggcatcggccattgcttgaacgtacatgaagggccgcaaagcatccgcatggaagaaaacccggtaatcctggaaccgggcatggtgatgagtgacgaaccggccatgtaccgccccggcgaatatggcatccgtaccgagaatatgatcctgatccgtaaagacagtgaaacggaattcggaaagttcctcggtttcgaaactttgacgttatgttacatcgatacgaagctggttatcccgtccatgctttctgtacgcgagcatgcatggctgaacaaataccaccagatggtatacgacttggtaagcccgcatttgactgaagaagagaaggcttggttaaaagaaaaaacggcagaaatttaatcaacagacgattgacaattgacaataggtttgtcgttctcccttaaattgtcaattgtcaattattaattgtcaattaaaaagttatggctttaataaaatcagtaagaggctttactccccaaataggtaaagacacgtttttagcagacaacgccactattatcggcgatgtagagataggcgaaggttgcagtatctggttcgggactgtgttgcgaggcgatgtaaactccatccggatcggcaacggggtgaatatacaggacggctccgtcctgcacaccttatacgagaaatcgacgattgagatcggcgacgatgtgtcggtcggccacaatgtcacgatccacggggcaaagatatgcaacggagccctgatcgggatgggctcggtcgtactggaccatgccgtaatcggtgaaggagcgatcgtcgctgccggctcggtcgtactgagcaagaccatcgtcgagccgggaagcatctacgccggcataccggccaagttcgtaaagaaagtagacccggaacaggcaaaagagatcaaccagaagatagccaagaactatcacatgtactcatcttggtataaagaagagcactgacccactatcacgggacaggataaacaatacaattgcaaatgaaagagtacaaatacatcctgctggacctggacgggacgattacagatccgatgatcggcatcacccgatgcgtcgaatacgcattgaatcatttcggcatacaagtgaatgaccttcgcgagttatgtccttttatcggtcctcctcttctggactcgttccgggatttctatcatttcacagacgaacaggccaaagaggctacagaaaagtaccgggaacgttttgccgacaccggcatttatgagaacaaactgtatgacggcatgaaagactttttagaagaggcaacccagcaagggcgcatcctgatgctggcgacatccaaaccgacagtcttcgccaaacgcatcctggactatttcgatatcgcccgttacttcactttcgtcgcgggcagcggcctggacggttccttctatacaaaaggagatgtgatccgtcatgtattggaaagcaataacctgacggatcatccatcagtcgtcatgatcggcgaccgcaaacatgacatcatcggagccaaagagaacaggctcgattcgatcggtgtgctttacggttacggtgaccgggaagagttatcgcaagccggggcggactatatcgtagaggatatcgccggactgcgcaatctgctgttccatcaatagcacgcccattttatcagatagcggcaaagcacatctccgccgaagatccccacgcagtagaggattcccaacctgtagcctttcaggttacaggacactttcaatgcctggaacatccagaccagtgcccagatcaaaaagacaaaagagacaagcgacaaccagattccgacaaggaatccgggctgttgcatgatctctgccggaggcatgttcacatctatctgtgcgagtttctgcataggcggcaagaagttgaaaaggttcatgacgatcaacggcaattgtgcgaaaacgaccgttcccaacacatcgaccatccgtatgcgtgaacgggaaagcagcaatcctcccaaataaaacataacagccggaatcagccagacggcaaggtgctccaccgcataacaccaccacgccggattcggagccggaccaaaatgcagcaacccgtgataatgccagccggaataaaaagaaagagctgtcgataccaccattccagccagtccccaaagcaatgcttccagaccggcaatccgttcaaaaggattaatcaatccataaagatgttgtttgttcataacctattcgattttatttagtttatcaatcagatcgtctaatacattccggacagtagggtaactgactcccatattcttcgccatatccttcaggcttccgctggatttgatgaagtcgattacaaactgctgttccttatccgtcagttttgccagtacaggcagttcaaatgtaccgcacacctccgtatcgcattgcccacaaaacatccgacccactttcaaaggcgcgtcacaagccgggcactgcaaggggagtcttcttttgatctcgttattcatagatttatttcttattcttgtttatacttgactaaaagattactttacaacaaaagtattcaataatttataaacatgcaagaaataataaatattattcattacaatataaatattattcaaatacatatacaattatatcattcatcctcgttccaacatgaaccagacaagggagctaaatgagccaccgagtaacctccatataaagaaattaaactacttttgtgacaaaacacttaaaaaactaaacaaattatatcatgagaaagaacaatctgtggataacagcccttgcattcgggctatcgttatcggcttacggacagcaggcagagggcggcatctcgtccggaatgttgcaggaaatcaagcaagcctacaaaggaacgccggccgacaaagccattcacaatgcaatcgcgggcaacgacatcaacaaactggcagtcaacaatgacagcaaaaacaatttcgacacctacttttcaaacaaagtgaacagtaaagggatcacgaaccagaaatcctccggccgttgctggttgtttacaggattgaatgttattcgtgcgcaggtcatcgccaagtataacctgccggaattcgaactctcgcagaattacaacttcttctgggaccagcttgaaaaagcaaaccttttcctgcaaggaatcattgatacacgggaaaagccgatcaacgacaaaatggtggaatggctgttcaagaatccgatcggagacggcggacaattcaccggtatctccgacaacctgatgaaatacggcatcgttccttccggtgtcatggtcgaaacctatagcagcgacaataccagccgtatgtccaacctgatcggcctgaaactgaaagaatacggattggaactacgcgacgcaaaaggctcgaaaccggaagcgctggcaaaacgcaaaaccgagatgctgggcgaaatctaccgtatgctggtcctcaacctcggagaacctcctacgaaattcacctggacacgcaaagacgcaagcggaaaaccggtcgagacaaaagaatacaccccgcaatcattctatcaggaattcgtgggcgaagatttgaagaacaactatgtcatgctgatgaacgatccgagccgcgacttctataaactatatgagatcgactttgaccgccatgcctatgacggcaagaactggacatacgtcaaccttccgatagaagatatcaaagagatggcgatcgcctccatcaaggacagcaccatgatgtatttctcctgcgacgtgggcaaattcttcgaccgcaaccgcggagtgctcgatgtcaactattatgactacggctcgttgatgggcacgactttcggtatggacaagaaacaacgcatccagacattcgccagcggctcttcccatgccatgacactgatggcggtagatttggatgccaacggccaacctaaaaagtggatggtggaaaacagttggggaccgggtgccaacaacggccacctgatcatgacggacgaatggttcaacgaatacatgttccgcttggttgtcaacaagaaatacatcaccgacaaagtccgggaagtattgaaacagacaccgacacggttaccggcttgggacccgatgtttgcagaagaagagtaatggaaattgaaagttgaaaattgaaaattataaaaacggtcattgttcttggaacggaatttaattttcaattttcaactttcgattttcaactatcaatagtatccttcattctgcgcctcttcggcagatggcttcggagacaggcggtcgatatggttctgcggaatcggacgtagtttgtgatattcctttatgttcggagcggcatccggattaaactctttcacacgctcgtacaacgtttccgtacgcaccaagtcttcccagcggttcatctcgccgtatgtttcacgggcacgctcatccagcataaaaccgataaaatcgtcactgatctctgccggcgtcaccagcatcgacttttcagtcgaaccagccaggttagccatatcgccaccatctatctgccaccactcctgcggtttggcttctccttctttgtaggcggcacatttacggacgacgttgatcagcgaagccgctttctcgaaatccccctttctgccataagcttcggcagctatcagatacgtctcacccagccgcatacggacaaagttacgtcctccctgttcatagttcatatccggacgttgcgtatcgagccatttcttcaggcaagggaaaaagtggttcgtgttttcatcgatcggaatcaatgtataaggcgcctttgcgatgtccaattgcatctggcggtctttcgctttgtcgatcacagcacctttataatctttcgcaccataatatttcgggataaagtaagccgccgtatctcctaaagcgaactttggtttgccaaccagttcagcaggcgtttcataaagcaaatcacccgtctcctctccattttcatttacgtaataatatttgtctttccagacagggatggaagattctttattcgcatagaacacccaactgaacatcttatacatacgggagtcattcaggtggtcgaacaactgggtttgcaaataaggagtcggccgcatacgtttccaagcacgcccttgctgaaggtcgcgttgcaaacccggcaatttttcgtaagtcggaacccaatacaggtgcatcttgtttccttccgaaccgttaaacaacacatcgtttgtaaactcgacaccccagattgtttcagaagacaccttctgtctgtcctgatcgaatgtcattgaataatccgaatccaaggcgaactttccggagttgataaccgcttcggcaaaataagccgtactatccatatcggttggttgttgtccgcgctgatctttgatagcgctcccccttgtcaaataaactttcgacaacaaattagccgccgaccatttggttgcacgaccacgatccgcctgcatggccacatcaggcaacacttcataagcctgacgcaaatcgctaataataaacgcatacacatccgccaccgaagcacgtttaaagtcggtcttgatttcagaaacgtttccttccgtcaataaaggaatacgtccaaattgctgaaccagatcaaaatagaaataggcacgcatgaaacgaagttcaccttcacgcgccgttttctcggcatcggtcatatctcccactttcggcagatacatcaaagccgtattggcccggttgattcctttataggcattcgcccaaaaatcatacaacatgccgaaagatgcattcaactggttgccgtatttattaagagcatccttatttccgccatcggcaccttcccagacataatccacgccatattcggtcaaactataataacgttcaccgccgacataccagcgcatggtcgaatagacaccgtttacggcagtttccataccggtcttcgtttccagataatcgtatgagacaccactcttgacttcttctttcaaccacgattcgcatgacgtaccggctgtccgataaaccatttgttgccttcatcgtcaacttttccgttatacaattcaacgatttcctctttattagtcgaaaacataacatctgtagaccacttaaagtctttcgtatcaatatcaatcgtgttcaaagtgatttccaaacctttattacgtgtcttaccgatattggtcgtgacaccaccgaaacctgaaacgatcggcaactggcgatccatcagcaggtcgttcgtattttgcaaataaagatcgacgctaccaccgatacgtccgttcaaaaatccgaagtcgataccggcattccattgttgagtcttttcccaagacaagtttggattaggcatttcattctgatagaaagccaatactccgttcgaaccataactatagcgtccgtagctaaggctaccctgtgttttatatggatcgatagccgtattaccggtgataccccaacctaaacgaagtttcaagttactcagataatcgacatctttcaaaaacgactcttctttaatacgccatgcaaaagcagctgaagggaacaacacccatttatgcccggtagccaaacgggaagatccgtcataacgcgcggaaattgtcaacaaataacgatccttgaaattataattgacacgtcccataaaagaggccagccgccaacgccggtaatcactcgatacggattcgatcgtctgggccgaaccgacattgttccactcctggttctcataaggcaagtctttcaccttgatttccgacttctcgtatgtttcctgctggatagactgcaagaaagtcacacccagcgtatggtctttcttgaatgttttgttatacatcaacaggttttcccatgtgtacatccgacggttatcgcgtgcattaaccgcacgggccggactgccggaacggtcgccgctcaatgcaccataaaactcattgccataccaagggcctatatcgataccgacattcgaacgatatttgatatcgaacggaagcgtaacatccacataataactacctaagaaacgatctttcttgatttccttcttgacattgtccagatccaagaagcggttccaaacctgcgggtcgttacccggacgatcctttatcaaatcgccattcgtatcataaatatccgccaatggataagttagcttgacatcgctataaagattcgtcccattattacggtcaatatgtgaaaaagaagtcgaaccgccaacttttacatatttattcaacgtccaatcgaaattgaaacgcacggaatatcggcgataatcctgtcccttcacgataccgtcctgaccgaaataggtagcggaggccaatactttcaacttctccgtcccccctcgtacactcacttcatggttgtgcatcggagctactcgcaaggcctcttctgtccaatccgtataagggacccggtcgccatgccaaacaccgttttcgtcatacccttgttctattttactgaagaccaacggatctgcactaaaatagccgatcttccgatcccaatccaaagtcggaaccaatggataagaagttgttttagaagtcgcacggttagcctcacgcaccatttccacccattcattgccgtccatcatctctattttgcgggcagcctgttgtactccgacatagccattataatcaacttggactctcccctcttttccctttttggtcgtcaccaagatgacaccgttggcaccacgcgaaccatagatagccgtggcggaagcatctttcaacacctcgatagattcgatatccgaagggctcaactcattcaagcctaccacgataggaataccgtccacgacatacaacggttcgttgttggccttcaacgaacgatttccacgtacccgaatactggcctcttcacccggtttcgcgctggtttgcatgaccgtaacaccggcggcacgtccttgtaatgcttgcacggcactcaaagaagccgtttcctgcaacttctcccccttcacggaggctaccgaaccggtcaagtcccgcttcttggccacaccgtagccgacaaccacgacttcgtccaagttctgcaagtcctctttcaatgtgataatcacactcccttgtcctttgtaagcatagtcttgcggctgatacccgatgtaggaaacagacaacgtaacaaccggtttagagatggaaaaagagaatttaccgtcgatgtcggtaatggaaccattcgtagtccctttctcgactacgttcgccccgatgataggctcaccggtcacatccttgacaacgccggaaaccatatgctgggcataggaaagcgtggtcgtgcacacaaaaaacaaaaagactaacatgggcagatgcagccttttaaacgttttcgttttgttcataataataaagaattaaattatccggcaattcccgaaccggatgattttttcataaaaagaggcgtgggaactgttgatatacctgatattgaggccttcgactgcccgaccagtgatataaacaacagcccacgcccttctattcttgaagacatacccatgccaggcatgaatatatataacaaggaaggtacgtgagcgttcagttgcctattatcctctggtctgaaagtgtcgaagtttcaatatccggataatatcttttaaacgcttcttgtaatcaataaaatgcagggacctgcaacgccatgcaagtgtacggacacaaatatagagagaagaaactatacaggcaaacaaaagtaagtatttctcgtttttcttacgaacaggctatatttagaggatagcaatcatattactattgcaaaaccatgcaacctataaacatttgacctttgtcgaatacgtttttgaccttagtcaaaagggctttcgaccttagtcaaaaaccttttcgaccaaggccgaaagctaaagaagttagcaaaaacgacataaatatccatatcattgcatattatacaatatcaaataccactttaggacgggacagtttgtctgttgtttacatttatgaataacctataacaggattttttaatacacagtcaacctatttcaggacgagacagggtgaagccagaaaacgtctctccgccgaaaggtatcatctgatcaatcttttccccaatccgaaggttttgcgcccatttggaggacaagcgttccaccggccgccagatcatcgtgcgtcaggtaacatttatcatacttcttcccgttgagtgtcgcactttggatatagatattctccggactgttgtcacgggcttcgatcacaaaagagccaccggcagcataagccggatccagacgaaactccacccggtcgaataccggactggtgatctcatagcggccatcgcccggacatatcggatgtatgccggcagccgccaacacataccaggccgacatctgcccgacatcttcgtttcctaccaagccggtcactttgtcgtgataagcgtttcggcaaatgtcgcgtgtccatttctgggtaagcgaaggcatccctaacctgttgaacaggaaaggcacatgatggaccggttcattggcatggttataatagtcattccagagatagtcgcccggtgttttctcaaacatatccgtcaggtcggccaaaaccttttcacggcctcccatcaggcggatcatcccttcgacatcgtgcggcacgaaccatccttgctggtaaggattggattccacgcagccataaccctcttgcaaacgtcctttttcaggcaaagaagaaaaaacgcctttctcattacgcggacggaaccatcccgattcaggatcgaagatagttgcatacgacagggcacgcttgtcaaaatgagcccggtcgccctctttccccaaccactcggccaaacgggccatgcaccaatccgtataatcgtattccagcgtgcaggatatattgccgggcgtatagccgtcgtcattattgccaaagcgccgggaggtgttcagagcatagcggtatgctttctccacgtcataatcccgaatgcctttccggtaggcatcacacaaaaccgaaatggcgggattgcccaccatgcagccggagtaagcattcaagaactcccaccgttcgagatattcgttaccactctggtcggctatctccacaagcgagttgacaagatcgttcaccatctccgggttgatgatggtctgaagaggcatctggctacggaagacatcccatccgctgaagatcgtccgtttacggaacttgccagtctgatggatctttttatccgccccggtgtactcgccgttgatgtcgctgcaaaggcgcggatcaatcaacgtatgataaagagccgtgtagaaaaccctcttttcctcgtcggttcctccctcgacggagactttcgccaactcgtcattccaaagacggacacactcggcatgcgtccggtcaaaatcgaagtctttcatctccgccgccaaattctcctccgcattcttcaaactggtataagagataccactctttagcaagatcacttcatctggtttggtttcaaaattggcataaaagcctaagtgcttgccttcaaatgccgaaacggaaggatggatggatgcttggcggattgcctcacgatagcgctcgctacaaacatcttcacgtttacgtctccaatcgtccggaatatcggcagaccaaacgccatgtccggaaaaaggtttggaaaattgggcatagaaatagaccgtatagtcggccttgccgtctccgtttccccaaccgcccccatcaggcgtacattgcatccagcccttgatggtatggtcgtccaccacctctacgctctgaagtgtcgatgttcctcctacccgccgggccagatcgacttgtatgcgggcctccttgctttccgggaaagtgaaacgaagcattccgctatgaggcaaagcggtcgcttccgcctgaatcttataatcggaaagaaaaacagagtaatagcctgccgaggctttttcggtcgacttgtcataccgggaacgatatccttcttccggcttgtcttccgtgccggcgaatgtatgcaaatccccgattgtcggcatcaccaggaagttccccaaatcgccgtaccagccgataccggacatttgcgtaaatgcgaatccttcgatagtcgtatgctcataactatagccgggaccgttgtcgcctccggtaatcgtgttgggactgacctgcaccataccgaaaggagctgtcgccccgggaaacgtttttccaagtccatgactcgcgcccgccagttccgtattcgttgaagctcctacaaacggatttacataagaggacagaggacgcccgtctgcttccttctccaccgtatggcaggaaaacaaagaaaggggcaagaatagccccaacaaagaatgtctaatattcattattaccagatttaaaaaaggcggcatcaaaagtcgtcatccgtcatccctggatcaagtccgccatgacaaggacacttttgatgccgcctcgttctacaaagcttataaagccaattccttcaatatcccatccgtcgcacccgcattgcctttcacaaactggccggcactctcgccggcagccttcaagacctctgcataggtcaacagctcatccatcttggccacgaactcatctttcgatgcgaccgagaatcctccgcccactttgatcaagtcacgggcctccttgaacttctgaaaccggggaccgaacaacaccggaataccgtaaaccgccgcctccaacgtattatggatgccggctccgaaaccgccgccgatataggcgatcgtcccataccgatagatggaagacagcagcccgaaactatccacgatcaaacaatctttcccttcgagcaggctcttgtcctgcatcacatcggacaagcggacagacgggcgtttcaacaacgactcgatatacatcagatgttcccggtgaatctcgtgcggggcgatgatcagcttcatctccggatgctcgttgaaataagggatcagtatctcctcgtcctgcggccaggaactcccggcgatcagcgtctgacatctttcccctacaaaccgttcgaattctggcaactcacgcgcctgattacgcacgtccaacacacggtcgaaacgggtatcgccgtagaccgtcacgttacggatgccatattgcccaagcagttccttcgaacgttcgtcctgcacaaacaaatgcgtaaagcagtacagcatctttcggtaaggaactccgaaccattgaaagaacaactggtcgggacggaagatcgctgaaatgatataaaccgggattccccgcttcttcaactcacgcaaatagtttccccaaaactcatacttgatgaaaacagccacagcaggattcgccagattcaggaacttctttacccggtaaggcgtatcgaaaggcagatagcaaacgatatccgccccgttatagtttttccgcacttcatagcctgagggagaaaagaatgtaagcaatatcttatattccggatattgcgccttgaccttttcgatcataggacgcccttgctcaaactctcccaacgaagaagcatgaaaccagatgtacttcgcattccggtctatcttctcacgcaaaatgctattcgtcttccactgaccgaaacgcatcaggcgtgccttccggtggaaaggagaaatcatagcgacaataaaggcatagaaatgtatgagtaagctgtacatgataaaagaattatcaattgtcaattgacaatttatctatcgctctctggatacggcggatagactcttccttacccaaggcttccgttatgtcgaagatatgcggacctttgccttcaccgacaagggccaggcgggttgcattcattatatttcccaaatggtagcctttgctttcgatccaggcttttacctcttcttccgtaccttcgatatcgaacggttcacgtgcgcgaagcacttcgatcagttcggcaagctgggcggcactgtcttccttccagcgttttttacgtgtcttttcatcatattccgtcggagcgatgaagaagaacgagcaaagatcccacaagtccttgataaaggtggcacggtctttcatcatggctacgaccttctccacataggctgggtctgctttcacgccgtggctttcgaggatcggcataaagagggcggcagcttccttattgtccatagcctggatataatgatggttgaaccattttcccttttcataatcaaatttggctccgctcttgctgcaacggcttagatcgaagctatggatcagttcgtccatgctcattacttcctgatcattaccaggattccatcccaacaaggccaggaagttgacaaccgcttcgggcaggtaaccgctctcgcgataaccagaagaaacctcaccgctcttcgggtcatgccattccaacgggaacaccgggaagcccaggcggtcaccgtcacgcttgctcaacttgccgttgccttccggtttcaaaagcaaagccaggtgtgcgaaccggggcatcgtgtcttcccatccgaaataacggtacaacagtacgtgaagcggggcactcggcaaccattcttcaccacggatcacatgcgtcacttccatcaaatgatcgtccacgatattggccagatggtaagtgggcaactggtcggctgatttatataagactttatcgtccaggatagaagagttgataattacttctccacggatcaggtcgttcacatggatgttctcatccggttcgatcttgacacggaccacatactgattgccagcatcgatcaatgatttcacctcttcctcggaaagagtcagcgagttgcgcatctgcatacgagtggatgcatcatattggaaattgggaatttccttccgtttggcatccagctcttcgggggtatcgaatgcgatataagcacaaccggcgtccaacaactgatcgacatacttcttgtaaatatccctgcgttcgctctgacggtaaggcccgtattcgcctccgaagccgacaccttcgtcaaacttgatccccaaccaggtaagcgcttctataatataggcttccgctccgggaacaaaacgctgcgagtcggtatcttcaatacgaagaatcagatctccaccattctgtttggcaaatagataattgtataaagctgtacgaacacctccgatatgcaaggccccagtgggactcggtgcaaaccggactctaactttcctttgagtcataatctttctatgtgatttatgatttgtgatttatgaattgtgatttataacaacgcataaatcacaattcataaatcataattccgtttactgcggcaaaagtagcccttttttttctcttagtaaacttttttatgtacatttcgcctttcaatacataaaacagaacattatgaaagcaaataactatagcatacatccgagtgtctattttattgtggcggccttgttgatcgcttacttctttccgagggaaggaaaattccgttaccaattctatgaaggaaaaccttggcggtacgggttgcttaccgctccgagcgacttcccgatctacaagactgatgcggaagtacaggccgaacgcgacagcgctctcaaaaagttcgagccttattaccgactggataccacaatcgaatctgaagagatagacaaactacgcgccgactatcagggcacgctgaggaaccgggcgactccggcctatatgcagtatatcgaaaacagcttgcaaaagctataccgggatggtatcatttctacccaggacatggatgaactcaagaaggaggaatatccccgcatcaacctgctcgcgggcagcgtagcgcacccccattacagtagcgatttttttacagtcaagacggcgtatgagtttatcatcaacaattgcccctcttatctggacaagtcggtattgcaatcttgcgatatcaacaattatttggtggaaaatatcacatacgacaagacgatgtcggaaaaagtcagggaagatatcctgaacagcatcccgctggccaacggcatgatacaggcaggagaacgtatcgtcgaccggggcgaaatcatcgacaaccatacttacaatgtgctccgttcccttaagatcgtacacgagaccaagtccggaggagcccaacggcaaggtatcatcatgggaggccagttcgtgctggtattcggtattctcttctgcttctggctgtacctgtggtctttccggttgaaaatcctgcataacaggaggaatgcgcttttcctcgtactatgcgtattcgtgagctgcatactaacagagctttgcgtgacgtacgggttgttcaatgtctatatcctcccgttcgctatcgtgccgattgtcgtacgcacgttcttcgactcgcgcacggcgctgttcacacacctgatcatcgtgctgatctgctcactgatggtgcctttcccgcacgaattcctgttgctacaggtgattgccggcatggtcgtgacattcagcttgagggatttatacgaacgttcccaactgatccgctgcgctttcttcatcttcatgtcctatgcgctctgctacatcagcctgtccatctaccaggaagcggacttcaagaagatcaactggatgatgatgctctatttcggcatcaattttatcctgctgatgtttacttacatattagtctatatgctggaaaagacattcggttatgtgtccagcattacgttggtcgaactctccaacatcaatacgccgatcctaaaaaagctgtccgaaatatctccgggaaccttccaacattctttgcagatgtcgatcttagcgtcggaagcggctgccgctatcggagcaaacgcgcagctcgtacgtacaggagccatgtatcatgatatcggtaagatggcgaatccggcattctttaccgaaaaccaaagcagtatcaatccgcacagccagctatcgttcgaccaaagcgcgaaaatcattatcaatcatgtgaacgacggtgtcaagatcgcagaaaaagcaatgttgccaaaagccatcatcgattttatccgtacccatcacggacgcggaaaagccaaatacttctataactctttcaaaaaccagtatcccgaccgcgaaatagacgaagaggctttcacctatccggggccgaacccgttctcgaaagagactgccgtcctgatgatggctgattccgtagaagcggcctcccgtagcctgaaagaacacacggaagaaaacattcgtgccttagtcgacaagatcatagacggacagattgccgacggactgatgcgtaatgccccgctgacgttcaaggatgtggaaacggttaagaatgtctttgtggaaaaactgaagatcatgtaccatacacgaatcagttatccggatttgaagaaataaactgtacaagctcatccagtagcccagcgcaagcatcctccagcagatcaaggaccagctcgaaaccttccgctccactatagtacggatcggggacatggtcatacagcttgttctgggaatattccgtcatctgatgtatcttttccacggattccaaatccggggctttccgtttcagatcgtctatgttacggttgtccattccgataatcaggtcgaagtcgaaaaagtcttccgtacataccggacgggagaccgaatctaacttatatcccctacgggccgcatgcgagcgcatacgcggatcggctttttctcctgcgtgatacccaataataccggcagaatcgatcttgatccggccatccattcccgcatcctgaaccaacttcttcatcacggcctcagccgacggtgaccggcaaatatttcccagacacacaaacaatatcttatattctcctttcttctcttccatcattcttaatttacaatttacaccgggggattaatcccccggctattgactcgggattaatttctcctgacaaccgactctcaagccggatctacatcatagtgcacgatcaactgcttaaacggcaagtagcgttgcatttcagtgtgtaccgattccagtatctcacgtaccggagcaatcgcagcggcaatctctatctttaaaacgattttccggatatggagagtttgcacacgggttatcggcggagtgaccggacccagcacgcgttcgcccaaacgacgacgcaggttctcggcatacaaaacagatagttcctgcaggatcgaatcattccgactacgcaagactatcactatcaaacgatagtaaggcggataacggaacatgctccgctcacccaattgaagacgtaccatttccttataggcgaaacgttctaccatccggattagcggatggtcaggctgagaagtttgcaggacaaccgttccccgcttatcccgccttccggcacggccgctcacctgtaccatcaactggaaggcgcgctcatgggcacggaaatccgggaagttcatcaggctatcggcattcaggataccgaccacactgacgttcccgaaatccagacctttcgagagcatctgagttccgatcaatatctgtgtcttacctttctcaaagtccgcgatgatccgctcataggccgcacgggtacgggcggtatcgaaatccagacgctcaaccttggcggaagggaagagagtagcaatctcttcctccaccatctcagtcccgaaccccatcgtacgaagttccaggctctggcattccgggcattgatgaggcaactggattttatatccgcaatagtggcataccaactcattacgaaacttatggtatgtcaggctgacatcgcaattgacacaatggggaacccaaccgcactccttgcactcgatcaccggagcgaatccccggcggttctggaacaggatcacttgctctccctttcctaacgcctcgctcaacttttctaccaagaccggcgaaaaaagcgtgtctttcattatcttcttacgcctcaactccttgatatcgaccgtcagtatttccggcatcagccggtcgccataacgggtagtcagttccaccagaccatatttgccggtagtggcattaaaataagaatcaatggaaggggtagcggagcccaacaatgttttcgccccatgcataccggctaacaccaaggctgcattgcgagcatgataacgcggagccgggtcctgctgcttataggtattctcatgctcctcgtctataataatcagacctagatccttgaatggcaaaaacaaagaggaacgaacgcctaacactagcatcggctcgcccgtatgcagcaaacggttccagacttccacccgttcgttatcagaaaatttggaatgataaaccagcaacttgtcgccgaacaacttggccagccgttccgtgatctgggtggtaatggcaatctcaggcagcatatacaaaacctggcgtcccatcttcagcacctcatcgatcagccgcacatagacttccgtctttccactggaagtaacaccgtgcaagagacagacttctttctcccggaaaatatcatgtatttccccgtaagccttcctctgcgcctcacttaaagggttcaagggctgtaaacggcaaaccggaacctgcaaccttcctacctctttttcataactttccagcacacctcgcttcagcacaccgtccaatatggctggagaacaaccgcagttctccaacaattccttcttcgacaactcgcgtaccagtgccggattaagcgcatgactgagttctagaaaacagatcagcaagtgttcctgcttcttcgcccgcttgaagtccgcaaacacggcctgtaatttttcttcatccttatacacctcggcaagacggataaaggtctgcattttcggcataaagccccgtttcaattcctcgctcacctcaaccgcacctttagccatcagggaggcgacaacaggtacgacattccgtagcccggttttcttttccaattcagaaaccgtcagtttcaaaacaccggtaaaggcatccagcacagcctgctcatttggacgcaaggacccatcggcttcgaaatcttcattataagtaacagccgtttcactctccagttttagcccggaaggcaaagcggccttgtaaacatctcctaatttacacagataataggatgcgatccatttccaaaaacgaagttgcggacgacggagcacaggcgtggcatccagcaaagcataaatctcctttgtctcgtactggctatcgatcccacgctcatgcacatccatgacgatagccgtataataacgcttctttccaaaatggacgatcactcggcaaccgggtattaccgcttgttccagatcggatggtatgctataggtatagctattctccaacgggagcgggagtataacgtctgcgtacttcattcttattcttatttatacgaacaatgttcatagcgatgccaaaagtaacaaaaaaggccggactgctaaagtccggcctctgtttatctgccatcagatattctttattctttttagaacaggatggcagccgtaatcgaccaccctcggttcttaccgtttaattccaattttgatgcactataatcatccgtcaaaccaagagcataattgaaacctacctgcaaatgtttgatcagctccacaccggcacccagattcaaaccagcattaaagctttttgccttcaactggtctccgactgatcccggaatatcccataacttatcgccacccacacggaaaccgacatacggaccagccaccaaatatcctttgataataggcaagccgaatttccatttcaagttaaccggaacatctatataatcgttctttatgtctttctcactcttcacacctatccctttttgcgaatataggatagctgcatcaaaaccgactcccattatcggagccattacctccaccatcggaccaatattaaatccagtcacattatcctttccgacgagatccttgttgaaatggacagaggaaatattcaaaccgccttttataccgaacttaatctgggatttcgcaggtacggcaatcaacaccatcaccgccaacaatataagcccaacaatcttcttcatacttttttccttaattagttaatacgaattacaaataaacgcacttttcctataataaacaaatatcaccacctaagtgttgctgctgtgtagaattttgtgtagtaccaaagtagcatcaattatccaaatccgaaacaaagcgaaaaatgctaatcaccttactatcagcaattagcattttcaccaagtggtgccaccagcaacattaaagttaaattataattcatccgattaaatcgtattttatttgaatgtgctgattatcaatcgttctaaattggattaaatgtagatgattgtaaccgaattgatattttgtagtgactattgtagtgactatccaaataaaattgctatctttgtattgtcggattcataaaggaattgaccccacaattatggcaaaatcactttcaagattttatattcgtaagcaggatgaacgaaacgaaacggcaactttgttctttcgcgttcaaaataaaaagcataaggtggatacattgttctcctcgcaaatccgtgtgaatgtggctgaatggaaaaacgctttgtccagtgcagaaaactggatgcgtcaccagcgaaacaacttcaccctgcatgatacattgaacagaatagagtttgttgtaaagtcagaggtggaagggatggtctttgacaaggcgcatgtggaagcggaaattttggctattgctaaaccgaaaaaggcggaggctttactgaaggcacagaaggatgaggaaatgcgcctgcaggaagaactacgcatcaaggaggagcaacaacaactgatacaggaagggatagatagagaacgtgccaatatctggaatttcctgaacaggttttgtgatgaaatcaatactggagaacggctgaatggcaataaccgttatgctaaaggcacggtgaaggcatggggaagtttctgtaagctgtatgacctctttgacagaaagcaccgctatacctggaacgatgttgaccgtagttttgtaacgaagttccttgcttttatggaaaagggtgactacatggtttctgcccaaaacaagtatcttgttgacctccgtgctcttgtcaattatgcctatttggatggcttgcatcacaacgaccgtgccatgcagtatttctcaaaaaagaaagtcgaagaaaaggataaagctgcagagatttacctgacggaagcggaattgaaagccttgtacgaaatgcccctgaccgggaaacaggatgaggtgcgtgatatttttctcgtaggctgttatacttgtcagcgagtgagcgactacaatcatatcagtaaggacagctttacgactacggctaaaggaactccagtaatccggttggttcagaagaagacccgtaatgaagtcaaaatacccattatgaaccctaacctgaaggccatctgtgaaaagtacaattataacctaccttctgtggtcgatgtcattctcaaccgttatatcaaggaaatcctaaaggagttgtctgaaacggttccctctttggctgcaaaggttcacaccaaattgaccatgaagcagaagaaacaggaaacggaaggacagattgtggtggaacgtaacagtgagggggaagtgatgatgccccgttacaactgtgtcactacgcatacagctcgtcgtagcggtatcaccaatatgtacctgacgcacaaatacagcatcttgcagatgatgcatgtaagcggacataagacgcagaagactttcatggattacatcaagctctcttccgatgagattgcggatgagattgatgctatagccaatggtgcgaaagctgatgtgttttaaattagattacaatataataaactgaaaatcatatattatggataatttgaaccagacagatagcatcgttatataccaaactacagatggtgagacctgtatagatgttaagtttcaagatgaaaccgtttggctatctcaagcgcaaatggcggagttgtttcagaaggacagaacagtaatcggacgtcatatcaataatatattcaaggagggagaacttgaagaaagcttggtgtgtgcaaaatttgcacataccaaggattatggtcgtagagaagggtttacccagcgtacagaaaccaccctttataatttggatgtaatcatttctgtgggttatcgcgtcaagtcaaaacgaggtacccaattccgcatttgggcaaacaaaatcctgaagcaatacctgcttcaaggttataccatcaatgagcgcataaccagtcagaagttcgatgaactcagccagttggtcaaggtactgggacgtactatccagaatcaagagaggttgaccgaggacagccgttcgctgctcaatgtcgtagtggactatacttatgcactcgatacgctcgaccgttacgactatcaggagttgacgatagaaaagaccacaccccgggctgcctttcatgccacttacgaaaatgccatggaggtgattcgccagcttcatgagaagttcggaggcagtccgcttttcggcaatgagaaagatgactcgttcaaaagctccatcgggcagatataccagacctttggaggcgaggatctttatccctcggttgaagagaaggcagccatgctgctttaccttgtcaccaagaaccattccttcagcgatggcaacaaacgtatcgctgccacgctgttcctatggtttctcaatggcaatgacatcctttacaatgaagacggcaccaagcgcatcgcagacaataccctggtggcgctcaccctgatgatagcggaaagccgtacagaggaaaaggacaccatgctgaaagtgattgtaaaccttatcaaccagaacaacagatagagaaaatgaagtctgttgagtagatttatgttgtgcatttcttttttgacaggcaaggcacttatctttgcctttttcaaccctaaaaaagatttgccatgaaaagaaaagaagaagctccggccaaaggagcggacacggtaaaggagtggatggaagctcatccgcaggaatatgcccggtttgcagccaaaatgaaaacggaaggaataggaggcgtcctgaaattgggtgaggatgctttccggctctctccggatttccagcaggaggtggaacggatggttaccaccgggcggtttgatgtttcctccttgttggaacacctgacattgtcggagtttgctgaaaactacctgagggaaaagaatgaagaccacatggccatggccgcctgggtgaagtacggagagtcagctccggaacaggtggccgacgaactggataaggcagtcgtggcacaggacaaacacacatacagggagatgctctccagcctgttcaagctgttctggggaaagttctttcagcgggtcgaactgcaccgcagatgccgggaagcggaaggaagagaaacctttacggcagaaagtttccagcacatgcttgcctcgcaggatgagaaccgggtaaagcgtatcggagcatggctgggctatggccgcagcggcatggatatagcccatctgtatttcgctctggcagaaacggcggaaatcagctccaaggtggccgtgaccgactttgttgcagccttgaaggcaacctatccccaacattcaatcgtaggacaccgccaggtacagaaaagcgtcaattacctgaagaacctttcccccaaccggaagcaatacggcaaggatgaactcgaacatcgctttgccatcgacatcatcaagaccgaagtactgctccttgcgactgaaacagccgactgaaatcaattcttttcaattcgttcagttcgttttcgggtcagcgaactgaacgaacgcttatttcttttaaattcggctgattgccagttacttttgtgccatcgttctgtgttggaacggtggcgcttctgttttcaatccgtccgcagaagccgtcggaacccggacggaaaccagtatgtatggaagaattattcaacatcctcagtgagggcaaagcccatgtgagagtggaaatggatgctgcagacctcaaggcattttccgatgaactaatccgccgtgccaaggatgaactcggctcgatggtggaagccgcccgtaaggagcgcatgctatccaaggcagaagtaaaggaattgttcggtgtatgtgatgccaccctttggcattgggacaggaaaggcatcctcaaacctgtcaagaccggcaacaaggtgctttatcccgagtatgaagtgcgcaaggcgcttggacaacgcaaccaaatcctatgagcttatggagaatcccattcttttccctctgggtatatttcctgcgcccgtaaggtacatcgtggaatccctgcagaagtatgagcactatcaggtggactttacggctgtttcttttttcactgcatttgcagccgccatgggcaatacctggtcagcccgtttcatgaccgggtgggtcagccgtcccattctctatgtggtactggttggtccgcccagctgcggcaagacaccaccgttgcgtcaggcggtagccccgctgctcaatttggatgaagattcagaccgtatctatgcacaggaaatcaggcagtaccgcaaatgggagaagctgaccgccaaacagcgcaagcagcaatcgttgcctgaagaaatggaattgccgcagcgaaagtgtcacgtggtggtcaactccaccatcgaggctcttgtgtccgctttgcgcgacaatccccgtggcgtactcatctacaatgacgaaatagacagcctgctctccaacttcaaccgctacaacggttcggacgaaagctattttcttagcctgttcagtggtacccccttcaaatacacccgcaagtcgaacaacgagtatatcttcctgcccaatccttactgctccattatcggctccacccagcccggtatgctctcctcgctgtttggcgggaaacgctcgcagaacggcttttcctcccgtttcctgaaagtctatccggatatagcaaccatgccttcctggaacgaggcttccatgccggaagaagttctggatgaatgggaacgcatcatccgtcaggtggatgccgttcagcctccggcaggacaggaggggaaagcaaattcccttgaacttttcttttcacaggcagccaaacagtgtttgattaggtggaagaatgaggtgaacagccgtatctatgtggagtcggaaagcgaggcggagaaagccctctgcggaaaactggaaacctacctcatccgcttctgtctggtcattcaagtcatgcgcggtatctgtggagaagccgacatgaacgagattgacgaagaaagcgccgaccgtgccatccggctgacggaatacttccgtgccatggaaagccgcatagcgccagaaatggaagtcggagtgctggaccagcggcacaccgaactgctttccctcctgccttcctcgtttaccacctccgaagcggtaggtatcggcaagcggattggcctctcggaatccaccgtcaagcgtttcctgcgggagggtgcccgtgaattcatccggaaagaggcgcatggccattattgcaaaatctaaaaaggtcaatgacactttgacctttttgacacgatgacacttttacctcagtcgcttcgataccgatttttgccgcttcaatgcctttttttgccgcttcgatactaaaggtgttgcttaaatttgattgtagaaatacttttgcagtataaaatccttaagtaagataaaataaatgctttatgaagaaagaattagctgatataataaacttggatcacgtgagtttaagctctaatatttatgagtcctttgggattgattgtcttgtaacaaataaagtaaggacttattatcatctgcctaaaatacgtgatgcgtgagaaatcagagtttgcttaaaaattctgggaacgattggctgtcttacagctatttcccaaagaggtaaaactttaataccactttgctacagtgaacctcaataatcttcaaaataagacctatttgaattcaggtaactttaacatataatcgaaatgacgaacaaattattcattggaatgctttgtgcaatgttgttttcagcttgcacgcaagatgatgtattaggagttaacgaagaaattcctactaccaaaacactgtctgttctttcaactcaagaggcgcagataaaattcgcaaaaattctttcaaaggctgtcgcttcaagtgaatctgtaagatcgtttttaaaacaagaagctttaagtaaaatcgacaacggatataacatattttatcccattgcaaaggataaaatattggataatcgaacattcaaaaatgtactttcagatttcgaagaatatagtggcgaaatagaagaaatagaaaacaaagtaccgcttttaaacattcatatcccagaaatagctactttgaaagttagtgaactgaatatatctgataatgaaataccggttctctatcaaaatcaaatgtattttaatgggaatatcatagatacattagctaccaatgaagtccctggcttttatacttttgtcgtttcagagagcaacagcatacaggtaagaaacaaaaagactcgttgctcaaatgattgttatatcaatgataaatatgaatatgtcgattattcatttgtacctaacaaagataaatcgttattatcacgttcgtctgttgattatgacaaatacgatataaaatattcagaaaaaggatatgtccctgaaagtgacattgatcctttacttgtaaaagcgtacaagaattcttcaactcaaaagagatctacaaggtatttaatgtattacgatttacagagtacagatcaaaatccaaattctatgagatctgatgttagtgattgtatttttcgatttaaaatagctcctgatgcgtttaagcgatttgaggatattgcagatggtaaaggaaaccctctgtttaacggaaatcaaaccgtaaaaaaaagagcattatcccgagaggaagcaatcaagagactgctaacaggaagagctttttgttttctctttaaaatagaagggactatgaatggtactgatatcatatctgaaagcatgaagatttatgctactccagaaaagattttcaatctttgtataaaggaaactaaaagacacaagacgatgtttagacattcaaaatatacgtatagtatagacgagggtggtataaagtcgaaatggttttatcctcttgaccatggacacgatacacgactgaataaatgggatatagcaacagatccaatagaaaaaaaagttattgtgtatatagtgaatccagacgaaggttttactaaggaggtaacagaaacttattctgttacatatattacaaataaagattttggaggagacatttcaatacctattgacaaaataaaattgggtataaatggcaaattgaattcttcaaatactacaagcaaaacagtcactactcactataaggttacagaaactagtgaacgtatagatgattttcaatttaattattttgatgattatccaatagaaaatatagatgctggtagatatgttattcctatccgaaaagggaaaggtgtaatagaaacgagtattatgccaatatcaaataagtacttcaaccaaaaaagatttgaaaaatgaaaggtgttttatgtagatatattggtctagtatgctgcacattgttgttagttgcaattacttcttgcaatgatgagcatgatgatataccctatttaaatgacagtgtttggattcatcaattcagccctgaagataacatcgtagatgctgctggtgctgcattgtgttttggcaagaaacaagttgaatattttgcaatagattctaatggtaaagtattgcggcttttggattcatttgattatcatttaaagaatgatcaaattatagtcattggtaaaaaagaatatatgattacagaccatacgcttatgttcagtaataaaatgttttatcgcacagataagagatttgatgaaatggtgcttcggaaatagatgtgttccaatttagtatgaataagtggtaatcgcattcatttgttagaatgaatgtgattaccctataaaatggcatgtaatatgaaattaagacaattcatttcttgttctgtattttacataatgcttctctgttcttccacgcttttgttttcttgtgaagaagaagaaacttggaatccccaagattctagcagttgggggtattttgatggagaaatcaatggcgagaaagtgcatttgcagaatacagtctacaaagattacatcaataaaggatctcggtatacccacagtgataagtttgtcgatagtaagcgggcctactatatcaatatcaatctacttgataagaagaatattcgccttaggtgtaatttaatgcagttcgaagtaggcactcagtatgtaactgcttcaattccgtcatttcaagagaaagacgattataatgcggttagttgctgggcgacggatagcacaaatgtttgcaatgaattcgaagtgaaggcatcccgcccggtcaagttagaaatcaccgatataaaatatttctacgataacgatggcaacgcctataccctacaacctaaactgatagagggaaacatcgacgccgtgctgtatcatggcaatgattctatttccatcaaaggacactttgaaaccaagtgaatgccagcgtgaacattccaagaaattcggaatgttcacgctatgacgttatgcgcaggctttgtaaaaaagcagataatccttgttgtatcatttgatttttagtaactttgtatacttatgaaagcaaaagactacttgataacttggttatggacatccctcttgatgtacttcttatacgatgtggtttgggtacttgctgaccatgaagagttcaatcgtttgttagaagagggatgcacaattttatggattgatttatgttattgtttcctgttctctatctataatttgggatttggaactcttcttctgaaaagtcgattattgcgtttatttccgaaaaaaaagatacccatattgagtgctatttttctgttagccaatacctttctggcttttcttgtcgagaaccttatagacgtgctgtttgtggatatttccgattgcgaagtatggggaaatgcctacttgatgggactgatatcctccattcaggcgttgattgtagtcgtggagtattattacaaggagtctgaacaaaagtacgaagaaaatcgtcagcttgaaatgaagctcctcaagatgcagatgaaccctcattttgtgttcaacagtttgagtgtgctggcaggtttgattgacatagatgccaagcgggccgaagactatgtaatccgtttgtcaagaatctatcgccatattttgggacatatagagagtgatatagtgtccttagacgaggcatttcaatggttggacgattacatgagtttgctgaagttgcgctataccaatattgaactgcaagtgaaacccatggaaagacggaaggatgaatacatcttgtcgcaaagcttacaggtgctggtggaaaatgccgtaaagcataatgctatgaaccagcatgagaaactgactataatcgtagaacgtaaagagaatatgctggtggtgagcaataacatcattccccctacttataaatcggaacaaaccatcccctcttataaactgggattagacaacttagccaaaagatattttgtaaagtttggtgaggaaataagagtgaaacaaacctcagagttatttactgtttacttacccattgtaaatcaaggataaaacatgaagaaagtattgattatcgaagacgagcgcatcagtgccatccggcttgaaaaacttattcgcgaaattgacgacacaatagaagttgaaggaccactggtgagtgtgtcagaagttgttgagcatctgcaccggcacaatgattacgatttgatatttgccgacattcgcctgtcggatggcgatgtatttactgcctttcaagaaatcatgcccgcctcttttgtcatctttacgacggcttacgatgaatatgccatgcaagctatcaagaatcatggcatagactatttgctcaagccaatagatgaaaaggatttgcgtcaggccatccgaaaggtatctttggggacgaagggaaacatggaacaagtgcatcaggctatgagtgatataacccattataaagaacgattgatagtatataaaggagaggaacttattcctctgcaagtgtctgaaattctttatttttccaaggaaggtaaagaattgctctgcatgacagctgaaggcaagcaatatcatgtgcgtaatatgactatgcaggatttggaggaacaacttaacccggaaaagtttttccgcttaaatcgccagtatttcatccatatacgcgctttgcagcgaatcactccatttttcaattcaaagttaaaggttcgtttgcttcattgccaggatgaagagatattggtaagcaaagagcgcagcgtattattcaaaaaatggttggatggataaaatctcttttatatttagacccatcaagtcatcatcgttccttacaagacacaaactggatttaagaagtacaatacttcggtcctttttactagttctttctgctcttatctccaatgtctgttccgtatgggcgtagaaaacatacattgttaattattgattgtcaagtcatagagtcgtatcgcaggaaaaatcggtcaatatatgatggtgtaaaaacgcttcaataccgatttttgacggtttaatacctatttttgccgtttcgatacaaaacagattgcatcgtacaaagaatcaatgtacttttgcaatggttataagcaaatgtaataccatggtattggatccgactgtggtttcttttgcgaaggctatgcagtttatacttcatggtacaaacttcccaactgcatcaataaacaaaatcacaacctttgagaagtcggttgtaatcctaaatttccttatctatgaaaaaggtaagattcctttctcttgcagcaattcttgctcttggtagttttgttgctccgcaaacagtatcagcgtacacttatcacgtaactttgcctgatggtactcaaaagtcatttgaagcaaagaatagcgcagcagccgttcatcatttccgtgcaaattttacgaaaggcgtactaacgaagcgtcctaatggtggtttgttggatttcctataaactatgatagctgtggtatcggctatacggccattttaaatcttagctaattaaggaggcttgatatgagaatatggatgtttatttatactgtattgtgtttgcaaacagtcgaagcgcaaaggctctatagtgaagttggtgatatttatgaaaagtcaaagaggactgttgttgataacgctaaactcggggctttctataaattaaagtttcgcacagattctacgaagttgaacgattacaccgaggcgcaaacggtgctgatgatttcggataattacttgctgtttggtgattataaccggttggcctttgattccgtcaacgactacctggctgccagcaaacggaatgcccgcaacgcacaggcacgcgatgaatggatggaggccatcaagaagtggacctatttctttgtcaccctgaccgacctggccaagcagcaaactaccgtgcagacctatgacatattacggagctacgaatatacctatccgactccaaccatggaatggcagctggaaccgggagatacactcattcagaaccgtccctgcaaaaaagccacctgcacattcgccggacggaattacgtggcttggtacaccgagtctattcagcttccttacggtccttatttgtttggcggactgcccggtttgattatggagattcatgacaccaaacataactggatatttaccaacaacggttttggcaagatgccgaaatactcctccatgtatctttataagaagcaatacatccaggatttgatagtaactacgcgcgaaaaagccttgactgggtatcgcaatgacattgaagactacgagaacttaagtattgagatatttaaggaaaaggtagagcgaaacggcaaaatggttacgcccgaagccaataaaccgaagcgtccgagtaatatgctggaactacaatggtaaagatcatacacatattcttcttcctgcttctgtttcctatgtccgtatgggcgcaggaaacagtccttgtttttaagggtgcggtaacggataccaacggcaaaggcatagccaatgtattgtgcaaggtattgaatgccaaggattcgttgctggcctacagcatcagccggagcgatggaggatacaccttaaagtacaagaagcaggctaccaagctatcctttgccaaaatgggttttgctacgcagtgcattccggtggaaaaggataagttgcgctatgacgtgcaactcatcgaaaagtcctacgccattgatgaagtggtggtgaaggccgaccctatcactcgcaagaaagatacactcaattaccatgtggagtcgtttcgccaaaaggaagactacagcatcgaagacgtgctcaagcacatgcccggcatcgaagtgctgccctccggacagattatgtatcaaggcaacagcatcaacaaggtaaacatcgaggggttggatctgatgggcgaccagtacaaccaggctacgcagaatatgccggccgaagccgtatcgaccattcaggtgatggagaacaaccagcccatccgcgccttggaaggaaaggtgcatagcaatcgtgccacgctgaacatcaaactgaaaaagaactacaagatgcgccccttcggcgatgcggaagtcggggtaggcggaacgcctgtggtgtgggacggcagtttgaccggcatacaagtggcccggaaaaaccagctgctctttaccggagccttgaacaaccgcggtgcctcgctgcgcagtttgcaaagcggcatgtcgaactttacgggcatctacacccaggaccccctgccagtcccgttcctttattctgccaccaaccgccgtccgcccatatcccccttgtactacctggacaaccgctcatactttgccggtgtgaattacctgcacgccttcaccccttattccaccctgcgcttcaacctgctctacaaccacgaaggcgaaaaccgcgaggatagcacccgcaacgagtattacgctgccgacaccgtgagcgtgttcgacaacaaccggctgcaggcccgcgaagacgtggtgaaaggacaggtgcgctacgagctgaacggaaagaaggtgtatgtagagaatatcctgtcgggacaatggcaggacatgcgctccaacaaccgcaacgtaaccaacgtaggttcggtggtagaagatatagaccgaaagccctattatctccagaatgtggccaacgtcaacctgacgaccccggcccgcatttacaccctggcctccattgtgcgtacctatcagacccgcgaacaccttgccgacgtttggacggtcgataacgcacacgaacggcaggactaccggctgaaccattggttcatgcgccaccgcctttccacagctttcgacgtggcaggctatcccctgacgctgggttacatcgtggaatacaaacacaaccgtctgcacgacacgaagcatactgccacatcgtcgtactggctgcacacgctcgaaccctcgtatcaaatagagtggagcggcggaaacatcgaactgctcctgccggtggaatacatccgcacccgttgcggctggcggacgaagaacgaccgtaaagtgctgttctcgccctcgctcgatgtcagccaacgcttcggctacctgctgcgtctggatgcctcggtagcttacaatcagaatgcctcgaacaccgacccgtggttcaacggcacgatgatgaataattaccgcacctttacggtcggcaaagacagcctttcggtgcagcgcaccacgctggccaacctccgcctgtcgtatctgaacaccgtaacgctcttttcctggaatttgtatgcaggttggacgcgcagcacctccgaccattattttgaaagcctctacctgcccgactataccttgatagcccccgtgtgggacgaccgcacgaaaaccacctggagtgtggccctgtcgtgccgcaagaacttccgcgaggcgcacctcagtctgaacggacaaaccgattattcctacaacaaggaatatgtggcacaaaacgaacgggccgattacctgcgctaccatgccctgcacgctacgctttccacccagtggagcggactctcgtggtttcagcccaaactcacgctggccggcaatctcagctggaagaagcccgatgccttttcggcgaccgacaacctgctgaagaatgcctactactccctgacgatggacttttaccccatcagcaaactgcgcttgtatgccgacttctcgcaatcggtcttcgagattgcccacagtcattactctgtaaacagttttctgaatgccggactgcgctacgacttccatccgcgctggacggtgagtgccgacctcagcaacctgctcaaccgcaaggattacgaagtatcgctttatcagggagccaacttccagtattaccgcgtgccgttgcgtggccgcgagttcctcgtgtcgctgcggttcaaatactgaacctgctgcactgagtataaagatctgacaaacgcaaatacccttcaacgactgctgtaacaagcagatgttgaagggtgtttgcataaagtgatatagatgaagctacaaagcaaaggaatatttgaggatgaactcacgcggacgcaggcggtgcacggtatgggtaatgaactctgaccggacgatgcggcgctcgtaggtgttgttacctatcaggttttacaactaatgtatttttggaatttagaaattaaatctgtgaatactattcaattatcagataacttgtactgaaagtaatgtggtttgggtaactatgaattgatggtgatagcgttgtgcagtcattatatatctaagaacacctgaacaaggtattaagcatttaatagttttagatagcattgtttgaagaataaatgaattgaagcaactgaaaacaaacaaccggataaccaagatgcttgtaataagtatgcttataactatagtttcctttggtaggttcgttttcttttaaaacgtcctctttcgcaaagcgaaacagcgattaatcgctccactgcggtagcagtcggcaagtcactttttaggtggcaaaacgaattttgtggccacaaaagtacaacttgcttcacaaatcctgtaagcctaaattgactaataaaggatagttttccggcttgtctttcaaattcttaccaaggtgtgatagactaagatactagtttccctctggttgttggtatctttgcttgctgataccatggtcgtggtacctttgcgtattgggatgctcagtcaatcgtggcgagcgttcaatatacaagagtaccatgcactttgtgttcgagttatgtaagtcttaggatagtcttgtatatgggttcagagttctgaaggctgatggttatcaagataaggattttttgcgtgtagttcctggtacatgggaaacacaagctttgtgcacaaaggaacggaaatctatgatacttggtgtttagggtaaatcgaatcgtgaactatcggatggctgtaaggtctgaaagagtggacaatctgggaaaatcccgaaaagtggtcgacagctatacggggaggcgatagcctattttgcagacagagccaagcaagttgtacccttgtcattacaaaacgagtttgtcctcacaagggtaacttgccgattgctgcgcaacggggcgaataaattcgctgtttcgcttcgcgaaagagggagaatcaatgaatgttgaatctgtaaacttagctctttggggacttcggctctatggtgcaatgaacggataaaagactgcttgataaaccggatgtcatccgttcaaagttctgcctatatttgtttcagcagacaatggttcaagttctttatgttagacggaacactggatttcgggcagatgaaccggtgtttgccgtattgaacgtaaatcgtaagccaatctattgaagctgtggcagacaagaaaaggaaatggagcaattaagaaatgtctggatatggaatgggaatatcatgatgaaaagaagctatggttcatactctattagaataatgaactgaattcttccggtcagtggtttgtgtgttcataggaagtgaatacgagtatcattggaaaagggtaaaaggtcaaaaagttcaataaggtcaaagtgtcatcgtgtcattgggatttttgaaaagtcataggatgggggggatgaagaaggcaaagcgagttgagtaacttaagggaaggtgtgagatagtgactatctaactaaagggaaaagtagtcactatgttttattgtgtcatcaaagctgtctgtagctattgtactttgattgggagttaagattaaaagaagtctttaaatagcctttaatcaaagcgatttaagcgggtttactgggatttaaatagtgacttttgtagtgactattgggtgtagtggctaaaacgaaaaactccgaaatacttgataatgaagcatttcggagttttacaggtggtgccaccaggaatcgaaccggggacacaaggattttcagtcctttgctctaccaactgagctatggcacccttgttttgtttaacgggtgcaaagatatgaatcttttttgagtcttgcaataggcagagctactttttactgatttttattcttccaaagaattccagccttgtgcttttagttcgacttcgcctccatcacgacctaccaagtaattaccgagatcgggttttgtaatatgaccgattactttaacacctttcatttcagatactttatcatgatcagtgagaggaacagtgaaaagtaattcatagtcttcaccgccatttaaagctgcagttaccaaattcatattaaattgttcagccattgcagccgtttgataatcgataggaattctatcttcatatacgcgacatccgacattactttcttttgaaatatgcaaaagttcggaagacagaccgtctgatatgtccatcattgctgtagggataatccccgcatgacgaagcatctctataatatctttacgagcttccggcttcaattgacgttccaacagatattctttgcctgtaaaatccggtgtgaaatctttttcacctttaaatatccttttttcgcgttctaataattgcaatcccatataagcagctcctaaatccccggaaacacatatcaaatccgtttcttgggctccactgcgaagaacaactttgtctctttctccttccccaatacaagtgatactgatacaaagccctgttaaagaagcagaagtgtctcctccgacaatatcgactccatacacatcacaggccaactttagcccagcataaaaatcttctacatcctcaacagaaaaacgtttggaaataccaagtgatacagtgatctgcttaggctggccgttcatggcataaatatcggagaaatttacaacagccgatttatatccgagatgttttaaaggtacataagtcaagtcgaaatgaataccttccaataatagatcggtggtgacaagcacttgtctatcctcataggagaggattgccgcatcatcgcctacgccctttatcgtactattattctttatttcaatcctgtcagttaggtggcgaatcaaaccgaattcgcctaatgttgatatttctgtcctgttactcatatttgttttgtaatatattatttttaggaaatgtgataatatgtttttttattgtctcattaaaactctgctcattgtaaaacctgattacaatcggtagataatataaatatttcttccaactttccggaacaagaggactgttttttaaacgtgctgcatctttttctgttactaagatcaattttcccggtgaagtcatcttttcgaatatcacatccaatttcttgaaatctgacttgctaaacgtatgatgatcaggaaaaacgaccggcaacactttatttgaatacttttctgcctcacgaataaatggagtgggaactgcaatacctgatatcaacaatatatcatcttcttttccaatatttttatggtttaagaaacgagcttccgaggggaatacaggtttaacttctccataaacgatgctggtaaaaaaaagtaactggtgagcccgcaacttcatattttcttcaataacacgaaaatcgatcggcttcatatcttcgtcgcatttagtaacaaccacgatatctgttcggtttatattacttatcggttctctcaggtgtccggtaggcattagtttatcattataaaataaacgatggtagtcactcaacacgatcgaaagggaagggtgcacatatctatgttgatatgcatcatctaacagaattacttcaggtctgtctttttcagggagggataaaagattttgaatcccccggcggcgattagcgtcgacagcgacaagtatatccggaaatttattttttatctgaaaaggttcatctccgatctccaaactggaactttcagaatcagcaagaataaaccccgatgtttttcttttgtaccctcggcttaatactgcaatgcgatatttatctttcagtaaacgtatgatatattctgtatggggagttttacccgttcctcctacagataagtttcctatgcagatcacaggaatagaatattgttcggaatgtaaaataccccaatcaaaaagtcgatttcgcaaccatatcccaattccatataaaaaggaaaggggagccaggtaggaattaagttttattttgtcatttttttgcatgtaacttcttatctgctgacaaatatagttaacttatcggtggctgtcagttttttatttgtttatttcaaaaagaagatacaatttgaatctctttgaaagataagtttgcgtttattctgaaatattttcagggagtttgtgactatacacatttattgtagaattaagtcaatatccggataagatatccgtcgtatccttgttgtcttcttgataatctcttgtaaattatgtacttttgcattgtcccaattaacatgctatgccatgaatgtcaaaatagaagaaagctggcgaaaacgccttcaggaagaatttgataagccatactttgagcagttggtcacatttgtcaagaacgaatacagaagcgcacatgtgcttcctcccggacaccagatcttccatatttttaatgcctgtccattcgagaaagtgaaggttgttatacttggacaagacccttatcccaatccggggcaatattacggagtctgcttctccgtcccgcaaggagttcccattcctggatcactggccaacatattcaaagaaatacaccaagacttaggcaaaccgatccccacatccggcaatctggaccgttgggtagagcaaggcgtgtttcctatgaactcggtcctgactgtacgggctcacgaaaccggctcacatcggaatatgggatgggaaacttttacagatgcagtgataaagaaattgagcgatggacgtgagaatctggtattcatgctgtggggaagttatgcaaaagagaagatcgcccttatcgacacccataaacacttggtgctgacaaccgtgcatccgtctccacgctctgctgaccatggtttcttcggctgcaaacacttcagcaaggcgaatactttcctccaaagcaaaggtattcaaaagattgattggtaagaagtacgagttccggacatccgggtgtggagagcggtaacatccgggtgtagaaaggcagaagatgggcatgtttccaaacttttctgcttgcttttcgttcttttcctacttgttttagtaaaaaagtacctttatgttgatgaaactatctccacacagatgtatatcggcacggttccctgcgtttttgtaaacaataccggctacccgtttcaacggcaggtagtgatacaagtgtaatacaggaatccggtatgtatcactccttgcacaccatgtttgtcaatgcttgcaaaacaaagtgtgatagagtgatagagaaactggattattgtgcaagagagaaccgcaaactgataccgtagtttgagtttgaagtcggataggatgcactcgatatcaacggttcattgatctgaatgtcatagaatgcacggaccgtcaacgcacggctcaaaccgtaatcagccgagaaggagattgtctttgcgatgttaccgctagtagcctgcgtcagttgagtgtcgattttacgaatcaacgactgcatcttgttgaacgagaaatcaaggcgaacggtgaggtcattgctgaaatcacgcgttttcttcatcttcaaaaccttgttgaactcggcatatttgtaacccaaaccgatcgtcactttcttggaaagtgcttcgaccaattggtaggatgtcgtgttcaggcttaaattgcgggtagtcgaatagtccgcccgaaccgtcacgttattcaacagcgtcgcatctgcacccaacaaaggactaaacgcttcggtaaggctgacagacgaaatcgaataaggagacgatggtgtcgggttatcgttcagaatcgactggatatatcccagtccgtcctgcccggcatccacccaattcaagaaggatgtgaaagcacctaccgaataagaacaacggtactggtgactcaacgtcaagctcttgaaatatttcttgacagccggaatcttgatcaagccgtcgtaagtaacgcgccagttaggcaacatgctcttcaacgaagggaaagccgtcaagcctaccttcttcgggtccttaccggtataagcggccagaaatgcaggaatcaggacatccgccgaattccggttgacgccgttcacattatctgttcccggattataaggcattcctcccaagcctttatcatggataaagcccacatccggatatttcaagccggaatacttgctttcgatacgttgggcaatgatctcgcggtttgccaacaacttgtcaaaagctttcgaagaatagttattcatagcattgccactgcctccgaatgcgcttcccaacgcgattgtcgtcatggtaaagtttccccccataatctccggcataccttcatacataaattgtatttccgtattacgcgtatcgttgcgaagagccgtcaagtcgatcttcaatccagtgatcggttcgaggttcgcccgtatattcagatttttcgtactggtcatgactgcggcattcacgtctctctcggtatccgtaatcaaccagcctttttcatatgcctcgtctatatagctacgacgcacgtcaccgaacgcaaaaccgatccccggggaaagtccgaatgaagaacgtccctggccaaagatatcaccgatctccggacggaaaccgggcagcatcataccggcagagttcgtaaactgaatattgaaacggcgcaccatcatcaaaaagcgggcactgtgttcaaccgccttgtaaagaaaatcctcagtaggggccggtcccggtatgatcgtcaacttcaagcgcaccgtgtcttggttcaaaatcttaacttgtgcgaagttgatcggcttgaactttactttgtagacacgcccgtccgttcttctggccgtaatttgcacctttttcgtaaacattccatgctcgacaaccgtagcgctgtccggactcaagacaatttctttttccaatttcggctttttcttcttctccgtttttttagccgtagtccgggtattgttaaacttctggttgatcttcttcaaatatttgtttttgttgtagagagataacaggttcaagttcgcctgcaaatcgaactgacgctggttcttgatcgtattacccatctcgatatcttcgcttaccgtcgctccacgatcccagttgtaagtagcattgtagctcaaagaagcattggtccaatccagaaccgggatcagctgcaacggcaactgccaggtcgccataaactgctggtcatacttcatcggggttcccaagtcagcgatgctcttcttcacggaatctttccataactggtaaccgtccgggttcagttccttattcacctgcacatacggttcttcgatacgggcattcgtaccggaactgaacgttatgttcaggttattcgtaaaagcccagttcaaactgaaagcacggtcccaatagaagttctggctgaatgtcaccggaatatcgttagtgacacctgttgctgctcctgtcaggtcgcgtaattttatttcgtaataattacgcatcatggccgtctggaagttgatagacggggccacattaaacgccagttgtttggcatagcgcgtatagccgttgtttttcttcaataacttatcgaatggcttgatcggcttgacataaggcacatagctataggcaaaattagcacgatagtctttcgtcgtttcatattccgtttccggatttttcttatcattaatactgtacgaatatccgagtgtaaagtttgccggatcataaggcatcggattcttactcttgatattcacacgcacgttattgaatgaaacactcttgataaccgtcctatcttgagaataatcacggatcgaatccttctcaacctttgtttctgccttatcgatagcatccttcagtttgacatcctgatccagcggattgtatttcggatcatatgtttctttcgaataggcataatagaacgggatgctgacttgcgccttttccgggaacagcttacccaattcgatagaggtcgccacgttatactgtttgaagtcctccatccggcgttcattcaaagactggtcaagagcaccaaagccggccgtttcgatacgtccgcccacattcaccgttcccaagtcggaaagcgcaacattcaaattcgcattagcagcccacccaccttcttcattgaagtcggtcaggcgcaattcgttcacccaaacttccccgctcttcaacttattacgcacgttacgcacaccgatcatgactgtcttcacttcggaaagactcggattgcctttgacacggatcgtattaccatcgttgtccggatccctaccagaatagacagtctggaaagacactccattcgtaccggaccgtttttcccggttacgctccagttttaggtccgtcaaaatctccaaacggaaattcagcatgttttctgccggccaaacgattttctggtgttccgaattgttatagttatactccccgtgcggagtcaatttcaacggtacttcatattcgtaatagttattcttatagtccgatcccaggcggataaaaacagcgagatcgccatctgcaagatcgtttacatccaatttcggagcctcggcatgggtaaacagttgcaagcgcttatactgccgcaaatcataattcgtattcttatacacggcacgtgcatcttgagcggcaaggtccgttatctttaaagaaagcgcctgttcgttctcctgacggatctgaggctggcttggatccagtacacggctgacgcccgggggcaatgtatagctgaccggatccctgtcactgttttcctcgatattgacagtcgagacttccaatttacccttcactgcgggcggcatcttcggatcggacaaatcctgctcgtaggatcgccattctccgcgtaccaattgcagagtaccgaagcgcaacacgaccgattccttaaatcctgtcatatacatacgcatgaaacgaatcgtcttgaaatcattgattgcccccacacgacgctggtattgttttaccggaatcttaaattgataccaggtaacggattctgtcgtaccatccgccaatcttactgatgaagtacgtttatccgcaatgaagttttcaccgacaaccgtatcctgcggagttatcctgactttgtattcgaaatatttttcatttttattcagagtattgtcctgattgatgtcttctacatcaggcacggtcttggaagaagtgctgtagcgctcgcccgaatcgttgatatctttcgagtttccttccgttccattatagcgtttgtaacgtgttaagatatccacctcctgagaatcatagtccgaaccacgaaaatagtggaacttgtcaccggccggatcaaagaaaggggacagctgtaacggatcgttctccatctcggttagggttaccgcattcaatttctggcgtaatttattcagataatcctggtaagccggatattccttttcttcatccgaggataaaccgttcaggccgacatcctgcaacagacgtgcacctgccgtattgtcgaaggcataaactgtactctgctgttttggaaccttaccccaaacagtataatcgaccttagacgtatcgccatcgattggcaatccgttttcgaagaacttcttttcatccttcaatatgtcttccgatatctcacccaaattaaaatacagatccccccctgttgtctgacgatcataaatgaacggatcgagcatccaaaattcgatatattcgacattcgccgtctcaaagtcactctggtctatctttcgcatcattccaccgaaacgcttttccgggttttgcaatgttccgtcaggattaatattatcggcatccaagttatacggtccgcgttcctgcggatagtaagccatgttcagaactgtcaacgtattactttcactcatgctttgctgccgttgcgggaacaactctctcgtctcgatagcacggacataatggttggacaaatcttttgtcgtaatatatttcggacgcaaagaagaatttttacgcgtgaacaatccgtcgatcgtgtaccaagcgagcaaagcacgacttttcccgtaatcgatattattggtcagcccggcttccgggaacaattggggcgtaccatcgtcataaggcacactggacaactgccagggataagggtcggagaggtcaaaattgctctgtgtcgactcgaagtcatccagatacgaatatccacccgtgttcttgttttcgtaatgcccggcaatcaaatgagcgaactccgcattgaaagatatctggctgggtttgcttaggttcagcaacggcagcttgtcgaacatattggtaagccactgactctcgcccttataagccatattgacaccccagagcgtattctttatcgcttcgtcgcccatcgtcgtcttggtggtcaacggcatttcggacatgtgcatgatggtagcgcctatcatcagattcgggttgaactgatagttcaagtccaatcccatcatggtcttacgctgcatgttataggctgtctggttttccagcgagacactgaccggcgtgcctgcagaaataatactttcgttcaggatcgttaccacgccggaagtatagtcaacagtataatctacattctcggttaatatcgctcctccagccgttactttcactgaacctcgcgctacgttggaagctcccaactgtatctcggcacccgaagaggctttgtattccccctccagtttgaacttattcttttcagcaatctgtctggcgacagtcaatgtcgagtcgtagagttcctggaatacatatttgtcagcaatcgcatcattgttaatctttttacgcagataggagccgaatggttccacacttggaaaaataattttcccattatcggcaaggacggtcacaccttcaataaagtcgtatataccatccggatgcggctgattgttggaatcatagctatccaggttcagcactcgtaacaagatttggttggcaatcgccccttccggcaaatagttgacatacgtaccggttgtatcgctttgatacatgatattcaacttgaacttctctttttggacagagtaagctcctaatgaatagatatttttcatcatcaggtcccaaaaaggcatatcaggcgacatggtaattcctttcaacaacttcacatacaggcaagaggcagccgatgaaggattgtcagtcgagaactcaccaacctgataagtctttccatccgaataagtataattgtaagcgacagccaatacctcatctgcctgcaactgtgttttcagcgagatataccccaacttcgtattgaccgtatattcggacgcatccagcaaacgagcgctttccacttcttcatactccgtaccgttaacaaaagttcctcccaacgcctgatttaccgtgctgatatcacgagcaccggtaaattgttggttaagggtattatataatgtattcgtattattataggggatagacagcgcccccgaaggagaaacgaccgccgtattcgaaatattatcatgctcggccagatcggcaaaagcgaccacgttacgcgcctggtcataagtagcccgtttgtttgtcacccaaacttccaccttgctgatcgtgacgggagaggaaatcgtattcaggttcttcaccgcctcatcatagcggtcgcgaaaatagtgtgacaggaaaaagtgacgattctcgtcatactggtcaatcgtcaattcgaaaggttttgtctgcacgccccctttagaactgaccgttttcgattccgactcctgctgtgcaaacaacgcattgactcgcagcttcccgaactggagatccgctttcataccgaacagggctgctcctccgttgattagggagttactggttgtcatacttacatttccggcttccagcgacttgataatttcatcttcctccccggtataagctaatttcagttttttggagtcgaaatcaaaagaggtttcggtattatagttcatatcgaaattcactttgctaccaaccgatgcctgtacattcaattgaacattctcatcgaaattaaagaaggtacggttacgagcacgttccggcaaagagggatttttggttttattctgcttcaagcctaactccacttcggccgaaccttgcgttttcacccggacaccgcccggcccaaagatacgttccgccgcaccgatattgaactgcatatcagctaagttgaactgcttattagccgccttttgaaattcttcctcgtttttctggcgatagtaggattgaacggatttttggaaactataatcctggtattcctcaggggtcaacgaaataggagtagtcagatcggcatcacctaacttggtacggactacatatgtcccggttctgatatcatattcgaccactgatttcacgttatccggcgtcttcaagtcagcaggtgactgcttggtaagatcctgatattcttcagggaccgtcttagctaccggaaagcgggtgcgcaccttcggcaccgtatcatccggaacgaccggctgttcagtatccggcaacgacatctcataggccagaaaatccgtattcatagaatacagacctgcaccaaacagtagaattgttatccagagtataaatttcagtgtccttctcatgttaattgacaattgacaacagacaatgacaaccgacaattccaaattctcctaaattgccaattatccattgcttaaagcattcttagggctgttttaatgacctgctcgacagccagtgcaggcgaacctttcaatatcgagttaaccgccttttgcgaagcggccttctggaatccaagcataaccaatgccgccacagcttcttctgtgacagcaccactggctgcgacagaagaggagccacctgtcactgtcattccctctatcggctttaccttgtttttgagatcaactagaatacgttgagctgttttcaatccgattcctttgactgacgtcagagctgtttcgttcttatcagcaatcacccggatcaattcggatggtggcagggaagaaaggatcatccgggcagtattgggaccgactcccgacacggaagtcaacatcagaaacagttcgcgctcatcttttcctgcaaagccaaaaagcaaatgggcatcctcacgtatcacttcgtacacgtaaatcttcccggtcggtttcccattataaaaagtatatgtattcaaggagatattcagttcataaccgattccggcacattccaagatcatcctggccggtgtcagttctactatctctcccttgatatattctatcatgtatcttacgtctttatgattcgcacctattataacgcaaaattagacaaaagcgtatatccgaactatcttttttggtattattgtttccaaaaccccggcaacaagattgtcagcaccgtaaagatctccaaacgtccgaccatcatcagaaaagacaagaaccatttcgataccaccggaacatcagcatagtttccgaccggtcccagactaccaagtcccggtccaacgttactgatcgaagagatagtagccccgatcgtctcctcaaatcctaccccatcgatcatcagcaccatacagctgacaaatattaaagcaatataggcaaaagcgaacgccaatacccggtggacgatatcaccagaaacagcatgcccgttcattcgtaccggaataatggcatgtggatgcgtctgcttcttaaactcattaaagaggttcttggtcaaaatcacaaaacggcccattttcaaacctccacaagtagagccagcacaaccacataccaccatcagaactagcgctaacagccagaaaaacggtccccacggaatataatcgaccgttgcaaacccacatgtagacaccaatgtcacgacctggaataccgtttgcctaaaagctgtaccaaaatcgtccacaattcctttatacatgatccagactgtcgatattgccgtaataatcagtacgaaccagaaaaaccagcgtgtttcttcatccgcaaataacttcttgggcctaccgttaaaaaagaaatatatcaaagtaatattggtcgcaccgataaacataaaaatcgtaattatatattcgatataggcagagtcccagtaagcgatactggcatttttcgtggaatagccacctgtagaaatacaagtgagcgcatgattgacagcgtcatacaagtccattggacccgcccataaaagaccaataaggataatggtcaggaacaaataaactccccacaggcgcttggccacctgggtaacacgcggacggaaacgttcgtgcgtgatacccggagtctcggcattgaacatctgggtagccccacctccgataataggcatcagcgctacggtaaacacgatcattccaataccgccctgccattgcgtaaggctccgccaaaacaatatcccgtgcggaagagcttcgatatcggtcaatatggtagagcctgtcgtcgtaaaaccagacatcgtttcgaaataagcatccgtcacattatctatatagccacctaaatagaatggtaacatccccaaaagggagaaaagagcccaagttaatgtaacagtcagcatcccttccctgcgcccggccgtatgttcattggctcgtagtccgatcagcataaaaaggactcccgttccgaacatgataccactcgactgaagaagcggatagaagtcatttccttcatataagaaagcgactgccgttgcagccagcataaacaacgtctcaaggatgaacatcatccctaacatcttaattataaaacgaatgttcagcataatatgctattaacaattgacacattgaacagagaaaagagacaacccagagttgtccattgacaattaattaaagtagtcctccaatttacgcatagccgtatccaaacagaacaccacaacgtggtcataagcttggatatgtgtatcacccttgatcatcataggctcaccgtcacgaatcaatccgcccaacgtcaaatctttcggaagattcagatcttttacctgcttacgggtaattttcgaatcgggacgggcaacaagttccgccacatctgcattggcaaaagttaaacacttcacgttcgacacgtctgcatccaacaggaattggtagatatggctggcagcaatcagtttcttattgataaccgagccgatgtccatgctctccgctaaaggtatgtagtcgatattttcgatcttagcgatagtcttgaatactccggcgcgtttagcagccagacaagccaagatgttcgtactcgaattatccgtcagtgcgataaatgcctgtgcatctttgatcccttcctgcatcaacagatcggtatcgcgtccgtctccattgatgatcaagacatttccagggacaacctcagctatacggtgactcttttctttgttagtctcgattacttttacacggatattgttcggaaggtactggcaggtacggatcgcaatacggcttccacccataataatgactttctttacttcggggtctcgcttgcccgcatgcaaccggacgtcttcgatatggcttttagtcgttgtaaaaaaaacgatatctcccgattctatacgatccgtaccacggggaataatggtctcgttctgccgtttgatggcaacgatatgatagagtttctgttcgttcagtaattcggacagatgtttgttcacaagtcgggaattatcgcgcacctttacaccgatcagaatcagagcgcctccgaacaactcccagtattgccgagtccacgggcgtctgacagccgtaacaatttctttggctgccagcatttccgggtaaatcatggaatcgatccccattttttcaaacagttccttgtttttagggagcaaatattcgtaattgttgatacgcgccaacgtcttatgtgctcctaatttagaagccagaatgctggctgccacattggtcgtttcttccggcgtgacactgacaaacaggtcggcctttctgataccggcttcttccaggtcccgaatggatgtcggattacccaccataggaaggatctccatgcttgaattcgtgaaattcaaacgttcctcattcggatccatcaggataatatcctgcttctcctgtgataacatttttgccaggtgggttcctacttcaccggctccggctataataattttcattttatataatagattaattataaggatatattatcctccgataaccatcttttttatttctcctgcaatacttttggcatccataccacacagtttatacagttcgggaatcgatccatgttcgacaaactcatccggcacaccaatccgttttacctgaggagcatatccgttatcagccataaattccaaaacagcactgcccagtccacctttgattacgccgttttcaacagtgatgacacgactgaacctcttaccgacttcatgcagcagttcttcatccatcggttttaaaaaaatcatatcataatgggcaatcgatataccatcactttcaacctcctttatggcctttatcacttcgttgccaataggtccaagtgacaagatcgcaatatcatccccatcacgaagtttcttgcctttcccgatcggaaggatatgcatctcattcctccaatctgccatctctcccttaccgcgtggataacggatcacaaaagggccgttacattccttatacccggtatacatcaaattccttaaatccagttcgttcaaaggagatgaaataaccaagttcgggactggacgcagataagcgaggtcgaacaccccgtgatgggtcgccccgtcttcgcctactagaccggcacggtccagacagattaccatatgaagattctgaagtgcaacatcgtgtatcaccatatcgtatgcccgctgcatgaaagaagagtagacattgcagaatgggatcattccctctttggcaagtccggcagagaaagttaccgaatgcccttcggcaatcccgacatcaaacgcccgtttcggaaacgctttcatcatataagtcatagaacaacctgtcggcatagcaggagtgacccccacgatccgttcgtcctgttcggccagctcgacaagggtatgtccgaaaacatcctgataaagttggggttcgttcaacttatggacaatgatccgttctcctgtttctttattgaacagccctggtgcatgccattccgttgccgacttttcagcaggcttgaatcctttgccttttttagttttgatatgtaatagtttcggaccttccatatcctttatatcattcagaaccttgatcatataaccgacatcatgcccgtcgatcggaccaaagtaacggatgctgaatccctcaaacagattatgttgttgagtaagcaatgctttcagactattgttaaaacgaaggatatttccccgacggtcattattgatcagtttcatcttccgcaatccgcggtacacatcataacgcattttattatatgcctgactggttgtgatatccaccaaatactgactcaacccaccgaccgcatgatctattgccatatcattatcattgagaatgataagtaggttgtttggattagccgacgcattattcagaccttcgaacgccaacccacccgtcatggctccatcgccgatcacggctatcacgtgtctgtctttttctccttttagagcagaagcgaccgacatacccatagccgccgaaatggaatttgaagcatgtccggcaacaaatgcgtcataagggctttccagaggattaggaaatccactgattcctttaaattttcggagcgtatgaaaagcctctcgacgtccagtcagtattttatgaccatacgcctgatgccccacatcccatacaatacgatcatagggagtattaaaaacatagtgtagtgcaaccgtcagctctaccgtaccgagacttgccccaagatgtcccggattctccgatagtacatctattatatattgacgcaactctgcacatacctctcccaatttatcgggggacaacttgcgcaaatcctccgggtaatcaatggaatttaatatgtgttcatccttgcattctgtcataatcgctataattttgtggcaaatgtaaagaattaacgggagataaaatagttttagtatgtcattctttagcagtatgacacaattaaaccgcttcttctcctttccctataatcaaatttaatcctgttttgcattttcgtatgtaacacaaacaaactcatttgccataaaaacaaaaaagcagtcacaaataattgtaactgcttgattttcagtggtgccaccaggaatcgaaccttttatttcggtttattctaaacccctgattgactgcacatttactactttatcttttatgaaagccattgaattaacactacactaaattcatcgcttttcgtaattgtctttacaatcatcatctctttgacaatgtaaaggtagataaaaagttcgatttccgcaaatgtcaatagggatttttatgaaatattttttgctcaaacctgataatgttcctaaaagatggctaagagcctgtctaaatcttactcaattctattttgagagttttatccaatatctttcagccataggctgtagcctgtctcttattaccttcatcacagtatcgaaatcaagcgcctctttccattgaatttttctaagaaaagccttccaacagcttatgcgtgccccgtctgtagcaaaactatccgtaaacagttgcaaatcggggttgtatgcaagtcctcgattgtcgaacgtcgcttcgatggcgtcatacaaagcgtcgtcattcaaatttctcttcgtcaggagctgataacagtcaaagaaatctttcatgcgactgttgagaacatcacgatctatcatcgtatggaacttctcggcaataacggtttctaaagaatatgcctgtatattcacagaagggatatccgataaaagcagaggaaagtctatagttgttggatgtggaatgacgacatcaccaaagccaatatctacagacatattataagctatggtatccatatgggcagtaaaatagaatcttgtaccaggatatttcttttcgactgtgatcggttctattttgatacttcctgcgtcaaatgacaccccatcttcatggcatacgatacccaggatttcttggaagacacgagccaggaaatccctgtcacgactgatcctgtctgccataaaatccacatcaaccgtaggacgagcctcaagtccattcatggcataaagcaaagagccgcctttcaacaagaatttgtccttgtactggcttacagaaaccctgtaaagcagtctctcgttgaagtaccttgccagaagatacatgtatttatagcctgtctcattcatgaggttgagcaaacgtgtctttacagacttgccatagtttttctttcccattatcttattctattgcgatttcgagataatttttcaacgtgttaaacactcttaggcgcttggcgtaatcctgcaaacgggcgagattacggttcggctttttcagataagtacgtattacttccgcgcaaacgtccagaccaatcttgttccgatacttcaccgcatcacaaacacttcgttccatatcagtaatatgaactttatatcccgatatatccgcatccataatcccaaactccaagttctcttttttccaataataaagttctataggcaggacgtgtggaagcactactttccttttattggcaatggctatgcaaaaagcaggcgggactgtcgtagacacttgatgatatgtccaggcattgtataggcatacaacaccattcggtattatcctctccacgtctatcatcgtgtttagcaatgcctcgggagctgcatataccccatgacgcaatcttatcaaatcgccacgttctttagctcgcaacacctgtttatattccgacaggtgagatatatccgttgtggatatagtccctccgagagacgcaactttattaattatatcattcatataatccaccttagaagttcttttcacactacaaaaatacgattattttccgaataataggtaatattctacggttaattcgtaaaaacaccgtataatactaccagtatccgtttttcatataaatcatatctatagaagaagccctgtgtcatctgatgacactgtttttgctgtctcggatataaagtggttctaggaattactgccggatgatggagaaaataatcgggacagttccgggaaaatgcaggaataaacaggaaaaagcgagactgccactcaaaaacaaccctgagacaagttggtatatgaaaattgatatgtacttacaatggagtgcatcttactgataaatcgaatgtacaagatgtagttaagcagtcgattactataaatctatcttatagataagtctgccggtgaatttatcaagttcatgggtaggctttattttcatcaaaagagaagatggcttgttcgaaagttggttgtgtgttaactgatgaaatagcgcattgtcaggatatatacccaatagaacgaatttgacaagatcaaagactattttatcgtgaaactccgaataaagataaaccaaatatctcgggaaaatcaatattcttaatatactttcttgaaaaaaacagtaaaagaacaggcatcattccgcaaaatattactttattcatttttaccatttattaaatagtcatatcgtataatagaaaacacatcatacaacagtaaaccacattccaatatagaagcaaagttagtaatatatttaaataggaaaaagaaaacgaaacaatacggaaacttgcttgaagcaaaaaacacaaaaaaatgatttttcaccaataataccgtaatccatgccaaaatgccttgactaaaattagtatctttgtattataatgctatttatttaacataaaatgagaaaagctatttatctgttattttttttagtttggttatgtcctgctgcttgtatggctcaaggtctccattttggattgaaagccggtgtgcttggaaacaaagctgatattcaaggtataagcaaccgggttaaaacagagaatatgactggttttcaagtaggtcccatgctacaatatcagaccggtttctatggactaaccttggatttttccctattgtatgtacagcgtggagtgaaattgacaaacacctccaatgacgtcagtgccgatatcaagacacaaagtatcgacatacccatagaattaaaatgggaaatggggttgtccgacaactttgacttgtttttaggaataggaccttctttttcctttttagtaaatgaggacaattggggacgcaaactagtccatatagccgtagatgccatagacaaggatctttcttctatgggatggcgttccactgaagtcggtctgaatctcggaggtggcgtgaagataatgaaacatctgatgctgagctgctactataacatcggattaacggaatccgccagacaccatatcggaggagacaagcatgacgccatagaccagattttcgatggtgatattttcaaatcaagaaacagatattggcaattgtcccttgcttatattttttaattaagtaaaacaataaagtcctatttatatggagcatacatccgcttttacttccattattgattcgcagcttttacctatgagagtcggaattgtatttttaatgggatgttgtattcttgccgcttactgtaccaataagcgcaagaatattgaaaagaaagaatatccaatgcttctcaaaggctacccggaacattgtaaaggaaggctataaaggtaaaatatacaattctggtaacttttagactctacaaatgacaatcataaaatatttactctttacatcattagtactatttaattcttgtcattcttacccttccaagaatggacaagatgataaaacagacggcattcgtttgtaagaggaattatgctctttatgtagacagcattattaaatccgataccaccctgcaacagcgttttcattgtttagaggcgatgttgggcacgaataaagtatctgtttattccagatataccgacagccccttttgaaatcagcattcaaaaaagacgtttttgattctccgttatgagaattagatattatatcagatatcacatttagtcctgaaatcattccaataaataaaaattctttcgaacggcctgtaaatatagtactgagtcctataccacgggatattccgcaaggagaagccttaaattctgattctctatcattgcgaactgaatatgactatcatcctttatcggtaacaggatactattgaagtattattaatgaacaattcacagcattttcaagaaatgttcagacgaaaagttgttaattattcggcagtcaatcatggaagagttcagccagcaacaccttttacggcacctgcattcttggatactctgcaaatatctatgaaaacagacaaagctttttatccgatagacacaaaaagcgtgtcgatgagtctgaataataataattccaaagtcttgtttttgggagaggattatatggtagcacgtaaagaagacaatcaatggctactactgaatggcaacaatgcatggactgatataggtattgaagttagacaagggaaaaaatatcaatttgcagcaaatctttatcccctttttaatgacaacaagcctggatattatagggtgtataaggaaatagttttttataattctaaagaaaaatagtttatggtagcggtattccgaataaattagggataaaggaattggatacagttttcgctcattagatttttaaattcaaataagatttttttaaacctaacaagggacattcagtaaaaagatcgcaaaaggattctgtatgtatagtcaatccgaataaataaacaaaaaaacttctgtataacgaataaaagaggctgtgtcgtgtaacatgttacgatacaacctctttcactatattttttgaaaggttctgtaacactttcaaacagataattctaactaccgataatcattcatcgatccaaatacgcccaaaatcaaactatagaaacagactatcttcgctaatattggataagacgagatttctattcaacaaaaagacatgaggcagagacagtttccccataggtttgtttaggacaaatccactccatcagcaaatactcgccactatacccgtcaaagtaacgaagcttcaaaggatgacaccctttttctagatagacaaacccatttgcttccacatagccgacagcccgatcattgtcaactacacgaacgcctccaataaacaggtccgaaccgtcattacttttcaaggagaaaccataagctcctgaaacagggacggacaaaaagctttcatacacatagccaaaatgatcctcgtttctgaaatcatcctcaaattctaaataagatttcactccctttgccttcatttcaccaatcttctccaaatcactcacagatttgaagttaccttcataatagcgataagataccccctgtcgccttcctttacatttgatagcacgtgagaaaccgatataacgttcatatacacgactgggctttccatccttataggtacaagctttcaatttacaaggagcatccagtatgatcgcaccttcacaacgggaagcactaccaaattcaggctcagttccatccagtgtataataggtatcaccttcaccgcaagacaaaactattgacaagccttctttgacaaacgagaccttccgctcatcaacatatggcatttctggcatttcctttgaagccaacagataggacactggtatttctagacgttcagtagacgagatatacatatttgtcacacggaaaggctgtgtcaattgagaaagaggacgagtcatatcacaaacagcatgtgccggaatacgaatacgatcacttaaaacgccgttatctaatagataaggaatatcactttcattcaatagacggacatggaactttccattcctttcctcataagaaagtactttcaacgaagaacgtaaaaacaatttcaacatgttctcttttcctgccaatttctgatcagcataggcgattgaacgacccgcataaagggcctccttaatgctttctggcgtattttcttttgcaaaaacaaacgtcaatgtacggaatttctttttcaagtcaaacaggaaatccattggataatgagcatccgttgctccaatataagccaagttatacaggtctgcataatcgatagcacgcggataaaactcttcgttattgaatatctcaataccctgaatccgcttttgctcgatatgacgaacaatataagcaggcaattcgctgttcttatctggccacccaggatgattcgttgtaatgtaagcgccctccgcagcagctttttcaatcaggctgtcagcttcagtctctgaaaaatttctttttttcggcatatagtcattacagtctttgataaaaaggacattcaagtgtccaacaggatcgctccctgtaatctccaccccctttatcagcgtaattcctttactttcagccattgggaaggctttattgtaagagacattacaatccttcgtttccgtgtgagaacgaggcactggctgatgatctgtgattgaaatagcgtctagtccttcagcccaagcctccaatacacgcatttcaggagtgacatgtccatccgaataataggtatgcaaatggaaatcacatttcagagttttatatcctggcaaatctggcactgcaatgtgtttcggattaaaagcacgagaggaagaatatccctccagcagttgatactgtacattttcattttgtgcggacaaagagacaccccacaatgtacatcctaatataaatacagacttcttcatttattgataataaaaatttatagataaaaaataatttcctgatttttgaaaaattgtcacgaacataaataataacgtttctatccaggaacgttagcgctcacattcttaaatgttctattgtgcacatcatcaaggacaatcgcaggacgatagtctttttcttttgcggacaacttcacattttgttacacctaatttcagatagatcaagcctgtcacaaaatcaccaagagtaaacgcaacacgacctccgccctgttcatgggagaaatcaataactttctgaattgtcgccacattcaacgtaattccatccgctttcgccccaaagtctctcactaaaaaatcttttgtcctgaacaaaaaactctgcaaaagaaaaaagagacaactcaattgaattgttttccaaattatttccatatcattatatattattcaatggcattagtaacattacagccaaaattatccacaatattccacagttcgccttatccttttgatactaatcattacatttctggcaaaaagagacctccttcatgtctatatcgaatgacataagcgaaacaagcaagtaccaattatatgccgtcacccaatccccaaaataggaaaccactctaccgatgtctaaagaggcggatcttataaccgcatttttctctctatgtctgccatttcagcatcaatgctgcaaaggacaaagaaatgagtgtttgtcaattacaaagttccatatttgccttcttcattgaaacgaaactcctgaacagagccatattattcactacaagaaattttctccgaagcaagcacggcatttacaactatattcgcccaaacactccaccgattcacttatcacctcaaatttgatttctttccgcttctcaaacaaccggctagccgacaggcgtccactgtgactgctgaccgcatcaattccggtatattatacgaaaacattaacgcgtcatagtaggttaaaggatccttctggggcagcaaaaacggtttatgccccaccccttccgaatcaacatagccaataaaaagacgtgtataaagtccatcaatccgcctgctgctgaacaccatccaacgaccattaccgctccaagaatgatagctctccgcctcttccgaattgaaaacatccaaaggatattttctggaagtaagcaaatcaagcatatacaggtcagcttccttatgccaaatagaaaaattaccaaaatcatgaagtgtaaaagccaagaaacgtccgtcaggagacaaacgcggaaaagaaacactttgtccttccatacgcgcgttgtaaagcgtgtcgacaacttctcccaaacgttcgttttggaaatcgaacgctatccggcaaagactgtatttcacttgcctgcaattctggggcagcgaatcgaccgcaaccgctgaacaaaaatataaaaaatgcccatccggtgaaaaagtcggaaatgtttcaaaagcacaagtagatcgtaacaaaggagaagtcattattttatgatctttcacactatatatcaccacatccgaggctgtatcatagacctccaccctatcgggatcatggctatagaaattttggcgagtcttgttcatggaaaaagcaatataatcacccgaaggatgccaatacggataaacaaaagaacccatttgctctgtttgcacatctagcttttcaaccaaaccgtcctgcagaatcaacgtaccagccaaatccgcacgcgcatggaacatcatacgtgacggatcacgctcacaataggcatgacagttcacgcaattaccttttgtcagacgattttccaaaataggacgttgttcataatcagaaaggtcacgctggtagattcccatttccctccaaccttcgtatccaggaggaactaatcgataagaaagataagaatctattgaatctggggctatatagattgaaaaagagcggtaacgcttccactgatccgactgatacgctaaaacagtcagacgaagcgagtcaccagcgtatcgacccatccaatccttccaatcggaaaccggaaatgaaaaaagccctcgtctgccctccatctgcatcagctcatgccctgccacttcaacgaccaaccggcaaggttcattccctaaataggagaaattcaatggggcgatattcatcggaaccgtcacacccttataatccggaaatatatcagggtcagcctccaacactccttgtatttgtacgggtctgtttccactacaggctccaaacaacagtcctgcaagcagacatatcatccaattaatctttgtttccatcatccaatctcagcaaaaagtaaataataccaaaatgtatgcttgaaaccatccaacaaggaacgaggagctccttgtcgtacttgttcatatcctttcttaaactgcacaaaccgatccaatgtggacgattcgacaccatgtgccttgcagtattcccaatcaacctgttggtaagcggataactgctcattcgagataccatgtcggagagcatagtcctcctccaatgtatgataataatctgaaaagaaaagcagggcctcctgtaccggttcggccaaatactgaagagccggagttccataataagtatcgacgaacgattgcacatgattaaagtctttcgccaaaagcaaataagcaagtgcatattgcatcgcatttgaattcgcaggattaaccgctacgattttataaagatcgtccataggagacgccaaaagaacaaatgaatcatccaaggggaaagaggcacgtccagtgcctaaagaaggatcttgctccacagcttcatcatcaaacaaaaaacgacgttgagcagtggcccaaccggcataatgcactgttttttccaacaaggttatatacttcaacgcaaccagataattccctcgcatcagttcaatccgcaccaacatctgaagcatggtcggattatatccattcaacgcgaataaagagttaaaagccacattctgagcagcagctatatttcccatcgcaaaccacaaatgagccaaacggacatcggctgatttattattcgggatataaacaagcgattgcggaccatattgaggataagtaaacaaatggtcaagcagcactccctgctctgccaaagagagattcaaataattcgcatcatgatagtgcataatacgcttagaagcttcccgttgcagatctttccattgtttcgtaacagtataatattcatatcgatattgttcaaaagaaactcgaacctgattcatcctccgatcctgcaagaagaaaaaaagtcctatttcgcttgtcaaaagcaacaagaaaacaatcctttgcaaccatttaccatgcaacagcgacattcgccccaccacaaccccaaacggaagaagcaacagtgccacccaactgatatgatggaaaacaggcatttctaatgtccattcataataattggcagaagtacatcctcgttccatttgagccatcacgccgctgcgcacagctccccaagccaataacaatgtaaatggaacataagacagcgaacaaagactttttttgctctttccagccaaatcacagcaaaaggcacaacatgcgaacaaagaggcaaccgctcctgccaacccaaacagaataaacgcaatcgccccccccagacacaatcgcattcgcaaagtttctctggctgtagacaaataaagataaaggccaaccatagccatagcataggcaatcagcccttcataaaaaaagcaaggatcaaacaaagacaaaatcaaagtccccgccggacaaaacgcaagaggggccaaaaaccattttcctcccaacttacgcaaaatccccatacttgccaagatgatagaaagaagcaaaagcgcagtcaaagagacactccaaacagttgaataaaaaaactggacaagaaaacgggacaagcaaagtgccaccccacctggctgcaaaagcaggcccgatacataatcggaatcaaaaagaaataattgttgctgttcccgattaaaaaaagcatactgaaaagtttcttttagatacaggctcagcaagaacaaacctattgcaataaatcctatccttccaacaattattttttttcgcttcattttctaatatttttaacagggagaacgagtcccaaagaaaaacataccgatattccaaaaactcttttttcctattctttatccacaacatccacatatacatctcccacttgtattcacttttccgatgttcaacataaacaagaaagggcagcatttttaccaccctttcttttctaatattattattttccaatttattaatatccagtattctgcggatattcaatacctgtattagactgaattacctgcgtcggaatcggatactgataattatacggatggaagttggaaatataccgtttttctactggatcccattcgcgcggttgattagaaccagacaagttttcatacccgaaagcatatttgcgagcgcgatcatacatcgtattacccgtcgtttcatcctgaatcggatgacaatcgctaatatacgttgcattcggattgacagataaacgattcaacgtgatccaacggttttcctctcccaacaactcacgagcacgttcatccaaaatatagtcaatatcgatatcggcagctgtacaataagatgcattagcacgatcacgcaatacattgatatcagcagcagctttcgacttttctcccaatgccaaataagcttctgcacgaatcagataagtttcagctatacgcaacatataccaatcacagtcataggctttgttgtcaccgttcggatgtctgtcatcagaaaatttccaaaaacgagggaaaatttcaactgtatcagaagccgtaatagcataagccgcctcatcggccgtgcctctagccttttctgcccgtgcataagcagcagctttttcatccagccaacgcgttccccccggcgtataccagtttcgctgaatcatgacctcagaaccacgaaaatctaccttaccatttttgcaagactcttcccataaacgatcccgtacataataggttggaataataccggttccttgataagccacattcccccccatcgagtcacgggcaatattcgcttcatagcgatctttcgcactcggtacattcgatttcgcactacccataatacctggttgaaaacaagccacattgtcaccccataaatatatctgagttccatttgacaaagtgcgttttttcgtatcattccgaacagtcgtagacatccaaaccgactcgatattattggcattaatacgccaccattcattaccgccgccaccggtagagtaagttccataattatattggcaaacccaaatagcttctttgttatctgttgagttctggttgccaccttcacggaaaagatcccaataagcaccagcgggagcagccaatgaattaccataacgatcggtggcctctccagcacgagaaccaaaacgagtcgtcatcaagtgataatctccgtccgtaccatcgataacacgagtagaggcagccacagcattatcaaaatcccctaatgctaaactaatttccgccaaataatgatcagcggcagctcgtgtaagcttgcccggtttagaggctgtctttggcagattaactgcagcatattcaaaatccttcttacagaattcccatacagtttgacgattacttggtgtatatcccgtagtaatttctgtcgcatggtgttccagaataggcacattgccatacataccggccaatacacgatacgcccatcccctgaaaaatacagcctctgcacggatagccagtttcttctcttcagaagaatattggatattaacacgttcgtctatcatatcaatgacagtattggcccggttgatcaacttgaacaaattatcataccaatgacgtgtatatccactttcagaagtcaatgtattccaatttgaaaaatgatcatttcctcctttttgactatatgtgtccaatccgattcccccaatcatccaagagtgagctccatgcgtctgccccatcatcaaagactggatctggcgataacaaccgttaagagccaattccatatctgattctgattgataaaatgtctggtcatcgaatttataagaatgctcttccaaaaattcatcttggcttaaacacccggtcaaaccggttgccaatgctgtactaacagctactacaaaaaaatatctcgtgagtttcatacgtaattcttttttatttactattagaatgtcaagttaatgccggctgtgaatgtacgataggtacctttactacccatactgctggatgtagggccacccgcaatcgtacccccatcttcaggatccaaacctgtccagcctgtgattgtaaacaaatctgtaccggagacatacaaacgaaggccttcgattccataaggtttaatcaatttttgatcaaaattataagagaataccaagtctttcaattttaagaaggaacgcggactccagtactgatagttcaaagagttattgtatccataacgaggataatcgttggtatgatttgtcggggtccaaggatcaactgcatccagctgggcaccactaccacctatactgtaagcgtgcggattatagcctaagaaatgagtatcattgccctgcatccaacgaaagttgaaatacaaagagaagtttttataactcaatgtgttccctaaattaattgtgaacaacgggtccattgatcccaaatactgacgatcattggcatcaatcttgccatcctcattaaaatcttcgaacttcaaatcaccaggaaccgcattcggcatgatcttattaccatccttgtccacataattatcaacttcttcctgactctggaaaaccccaactttcttcaaatcatatgctgcaccgatcggtttgccgataattaaagcatagtaactatcaaaaccgtaggcaaccgcattggccacatcatccgcttcttcacctttgtagttcttaccatacaagctcttgatttcgttacggttcaaatcaaataccacattagtttcccaccggaacttttccttaccatcaccatcaatattcacagaattcaatgtgatttcaatacctttattcgtcactttaccagcatttgctttagcagtctggaaaccggtaggatacggaacagaacgatccatcaacatatcggtcgttttacccgcatatacatcaacggcacctcccaaacgaccggccaatacattgtaatcaatacctacattaaacttttcaacagtcgcccatgttaaagaacggttcggcaaggaagaaggaaccagtccgaaagcactaccggaagcagaatctccaaaccaagtataagtggttccaaccgaaccaatcgtcgcatacggagaaacggagcgactaccgttctgtccccaagagaaacggagcttcagataatccaaccaatccgcgttgtctttgacaaaattttcgttactcaacacccaagctgcagaggcaccatagaagttaccccacttgttaccagcagagaaggctgaataaccatcacggcgaaacgtgaaattcgcatagtaagtacttttataattgtaattaacacgagtcaatatacctatggcagaactacttgtacgttcacggcgaattgtacgtgtattagccaagtcctgtttataaacccctaacgtagttggaacagaaaatcccttaaaatcggtacggagcaattcgctgttggatgcttcacgtgtataaccaatcatggcatccacatgatggtttttaaaatcacgcgtatatgtaaagatgttatctacgttccaggtagaagaaagttgtgtataggaataaccttcaacattcaccccaaatttatccggattgtccatatcagcagtattgtccgtattcacccaaatacgaggatcattaaaaacatcacgcatagctgaattacggcgggcattcaatgaaatacgataagacaacccttgtagaaatggaaaatctacctgtgcatacgcaacaccattgatgttataattacgcttctgatcatctgtccacaaatgagagtcaccagcaccagatccccaaaacggactggcagaattgccgtcaggtctggaattcggccaattctcgtaccccggctgacgcgcatgcgtataagaatagggtgtcatccaagtggcgttctgaatacgagcaggaactccccattctttagcacctaaataattccccttcaaaccaattttcaaccattcctttgcctgaatatccaacttggtcatgatgttatatttttcataatcatcccctttacgaatacccttttggcgcgtataatcacctgaaatataatagttcacaatttttgaacgaccggaaacactcacgtcatacttttggccaaaaccggtacgtgagatttcatccagccagtctgtataaacaccctcattataagcatcatactcaaccgtattcatcaactgagctctatcaaaatcagatgaccagacagcatcagaaggaatactaccgcctgcctgttttgcatagaaacggttgcggaagaatttttcttcatccgtcaccattttcggcatacgagaccaaccggaaaagttccaactcgagttcacattgattaccggcctttcgctcaatcctcttttagtcgtaataatgatcacaccattagcagcacgtgaaccgtaaattgccgcagcagaagcatctttcagcacgtctacactctgaatgtcattcgtattgatttcattgattgaaccaaaactaatcacgccatcgactatcaacaacggctgattgacactttgctggccagctgaaacatcagcaggaattgcattcttaccacggatattcagactactgaagttatctccccccgcactattggtaggagagtaacggaaacctgccactttactagataaggaccccattacgttcggatttggcagagcagcaagttcatctgtcatctgcacatttgaaattgcgccggaaagatcttttttccgagccgttccataaccgataacaacaacttcttccagttgctcggtatcttcttctaatttgacattaataaacgtctgatttcccactttcacctcttgggacctaaaaccgataaacgaaaaaaccaatacggcatcttttccacctggaatacttgataaagtaaacgtaccatcagtacctgtcatcgtaccgaccatcgttcctttaattgcaatattaacaccaggcatttctattccacctgcatcaactactttccctgaaacagagacttgggcaaacatctgcaatcctatacaggatagaagacccaaaaacaatagaatccgactcttcataattactatcattaaagttaaacattatttgcaaatattcattttaaaaaaaaaacaaaaccataaaaaatggtatttttatacagttttttgaccattcgaataaatcaaacttctatgactttccttagaaaaaatcttttttgtcatttgttattttttttgacataaatcctttcttttttgacaccacatccattttcttatcttaatgagataaggaaataatattttataacaaattatttttcaactatatatatatcattcacctcttaaatgttattattgagtttatcttttcacgtctatttttaaacaaaagagaagaatcctttttattatctttgtttcatcgttaactaaatttcatattttaatacaataacactaaaaacatatcttatgatgaacaaaatcctactctttttagcaattgggtttgcaacaggaatgctttcttgctcacaacagacattggaaaaaacagatagtcttcctcaaacctatacgatcagccaagaaaggctattagacaaaatcaaaggtggctgggctggacaaacgatcggcgtagcatacggaggtccgactgaattccgttatcgaagcgccatgattcaagactacgtcccaattagctatgcagatgggtgtatcaagaactatttcaagcatgctcccggattgtttgatgacatctatatggatttgacattcgtagaggtcttcgaccgtttgggaatagacgctccagtcgactctttcgcacacgcatttgctcacgcagactatggactttggcacgccaatcaggcagcacgctacaacattttaaacggcattatgcctcctgcttccggacattggctgaataacccacatgccgatgatatcgattaccaaatcgaagccgattttgctggcttaatgacaccaggtatgccaaatacagcttccgaaatatcagataagatcggtcatatcatgaattatggcgatggatggtatggtggggtctatataggtgccatgtattcgcttgctttcatttccgatgacattaacatagtagtccaagaagccttgaaaaccattccagaaaacagccgcttccaccagtgtatgaacgatgtaatccaatggcatcgacaatatccaaacgactggaaacaaacatgggctgaatgtgaaaaaaaatggaatcaggatatcggctgtcctgaagggactttacttccatacaatattgatgccgtcatcaattgcgcatacgtagttatgggattgctgtacggagagggtgatttttataaaactatggatatctcaacacgctgcggacaagactccgactgcaatccagcatctgcagcaggcattctggccactatacaaggatatagccagattcccgaatactggatgaaaaacttgcgtgaagtagagaacctcaattttgcctatacagatatgtctttaaaccagacctaccaaacctctttcaaacatgcattgcagatgatcaaacgcaacggtggcagcatcagtggagacaatattactattgtctgccagacacctgttccagtccgttttgaacaagcattcgaaggcatgttcccaattggccgtcaggaaatccggaaggaactaagacacctcggctcatttactttcgaagggacaggtatcgttttcacgggctacatccggggagctaaaaactatgttgctcaagtagaaatgtatgttgacggaaaaatcattgaaagggctgttctaccaaccgggaaaaatcatcgtgtagacctgttctggaaatatcagttgccagaaggaaaacatatcgttacattcaaatggctgaatcccgattccaatgctcaaatccactgtaatgacgctcttatctactctaacagaccgctcccgattcctcatcaataaagggaacaaactaaaactgaggacaggcggatattaaataaaaaagttattctgagatttatgcaaatagataaaaaatactaaaaacaaaaaaaatgaatgtagactacaataaacacaacattgtcaaatacttagcaaacaataaagataaagacatatggaaaatgtcggtgagcagtataggattccaatccaccaagtttctagacagctatcctccaaaaggccatccattcggatacaccttcaatcccgaacgaggacgaatcttagacgaattctccttaatctatattacaaaagggagaggaacatttcagtccgtcaactgttccgaaaaaaaaataactaaaggagatgttttccttttgtttcccagagaatggcatacataccgaccggcaaaagacatcggatggaatgaatattttgtaactttccaaggagaatattttaataaattactcaataagattttccaacctaatgatcccattatccacatcggcataaacgaacaaatagtcaagcattttcttgaaatccgggtgactgtgccaaggcacagtcacccggatttcaagctgtcatggcgggaattatgatgcatatgatcggcgatatctattcgatcaacaaaaactatgattgtgaaccagcttctctgcagaagatacaggaggcatgcgtactgattctagaaaacatttacgacaaattaacaccggaagacattgccgaatccatcaacatgagctattccaatctcaggaaatcattcaagcgatacaccggaatcaccatccatcaatacattttacaacaaaaaattagtaatatcaaaaaattactggacaatacggaaatgtcggtccaagacattgcaatgaagttaaatttcgggtcggccaactacttctcgtgctttttcaagagtaaaacaggtataagcccactttcctaccgaaaaaaattcgaaaagttgcaggaaaaagccccaaaggctctgtattaaaagggacattcagtaaacaaaccattttagtttagctcattgactgaatatcccgaattatatcattcccttcatctgtaataacgtgaatgcgaaatattccgctatacaggtaaaggaatgcaggattatttttcaaaaacttttgttggaggatgcgatctctccggcaatcaattcatatcctctgttattcggatggaggccatcaccgataaacaggctttcgtctattttgccgtcttgcagcaatagggcagttcccggattggcaaattcgtaaccttccgtttccaccatctccttaatatcgaagttgatgttccttacccattgttcctaattgcgacggggaaggatgccgatcactttgacggaggcttccggttgtcgctgacggatggcggaaaggaggaagcggagaccttcgacgatatccctgtcgctgttcaggccacaattattcgtgccgatcatcaagacgacttttcctgctttgtagccgtccagttcaccgtggtatacacgccaaagcacattttcgatgcggtcccatccgcagcctaggttctggaaaccagcaggtcgcatgagcttttcccaggcctctcgtccgttcttgttgcggtgttctaattcgccaccccaatagtgggtgatcgaattgcctaagattacagctttaggcggatggttgcgtacctgctccaggaaagtgcggtgacgaatctgccattcatacatgttcggttcccggcgttgggtgacgggaatggttgttgtcaagctgcctaaaggaatatgcaggatttcccggacctttctttctacggctgccgcttgttgctgcattccgaagtcggacgggtgcacatagtcaacccaaccaccggacggtatgttcaggtcttcgcgggacaaataatatacatctttaattccttcggactgaatctgctcgtatgctttacgggaagcacggttaacctgggtgatttcgttgtattttattgaatccatatacatattgctatagcctccgtgttcgatcagcaagatgggcagtaaaatagaatcttgtaccaaaatatttcttttcgactgtaatcggttctattttgatacttcctgcgtcaaaagataccccatcttcatggcatacaatacccaggatttcttggaagacactagccaggaaatccctgtcacgactgatcctgtctgccataaaatccacatcaaccgtaggacgagcctcaagtccattcatggcataaagcaaagagccgcctttcaacaagaatttgtccttgtactggcttacagaagccctgtaaagcagtctctcgttgaagtatcttgccagaagataccatgtatttatagcctgtctcattcatgaggttgagcaaacgtgtctttacagacttgccatagtttttctttcccattatcttattctattgcgatttcgagataatttttcaacgtattaaatactcttaggcgcttggcgtaatcctgcaaacgggcgagattacggttcggctttttcagataagtacgtattacttccgcgcaaacgtccagaccaatcttgttccgatacttcaccgcatcacaaacacttcgttccatatcagtaatatgaactttatatcccgatatatccgcatccataatcccaaactccaagttctcttttttccaataataaagttctataggcaggacgtgtggaagcactactttccttttattggcaatggctatgcaaaaagcaggcgggactgtcgtagacacttgatgatatgtccaggcattgtataggcatacaacaccattcggtattatcctctccacgtctatcatcgtgtttagcaatgcctcgggagctgcatataccccatgacgcaatcttatcaaatcgccacgttctttagctcgcaacacctgtttatattccgacaggtgagatatatccgttgtggatatagtccctccgagagacgcaactttattaattatatcattcatataatccaccttagaagttcttttcacactacaaaaatacgattattttccgaataaaaggtaatattatacggtcaattcgcaaaaacaccgcacaatactaccagtatccatttttcatataaatcatatctatagaagaagccctgtgccatctgatgatttctgatgacatctgatgccattgcttttcatgttttagagataaagcggttctttgcccaaatccatgaaaatgagatgttatgaacatacaggaagcaaaggacatcagacttgttgattttttagctggattcggatatgaaccggtaatacagcgtggaaacagcgtgtggtacaaatcaccttttagggcggaaaagaaggcctctttcaaggtagaccttcataaggaactgtggtatgacttcggactggccatgagggttctgataatctcattccaatgcattacatgtattgcctattaatggtgctataattctgatatatgatgtcttgcgcatggatttgcctcaacgaatacgaatctgtcctccgattacttgccaatattccactgcttgaataatattattcccaattatagatgtccataattacttcttttatattagctgttgcgccacctgtaaattctcttttaatattttaccgagactttttgcaaagtgtttgtatgaattcttttctttctctttatcattatccgataaattactactatcaatttcagagtgtacaaaactgacaatactatcaattgcattatctacggttttgctgctaatttttgatttatatcccaatgcatttataacacatatatttaccagctccaatatctccggcgatttaatagctgcttttattcgctctgccattagttttgcacctttatcttgtgattctgacaagatgtcaagaaagatatcagctaatgttatttccctattctccataatcttcaaattacaaactttccagcagttctatcattttatagatggtagttgatggattattatatgtatccagcatcttggctcttgccgttgcttctgatgttttttcagacagttgctgtttctcatttaatgccaaagttccctttgtgtagtgttcaagatgtcttttcagtttcttgatgcagacgttttgcgttagttcggcatgacacttctcaaagtgcagcaaataccacaactcaatacatggattcgacaccatcaatatcgcatctggaatacttagcaggtgttccagcattccgtccacatctaggtcaaacattaggaatgttttatcatttttggttacaacatattcccgtttacaattctctatataccgaacggatatgttcgaatcgctctttcttgggataatttgaataggcgcacggtattgtgaacggaggtggctgatataagcaacctcagactccccttcacagaaaacaaagaagtttggcttcattgttttgcctttggattttcttatttgtcgtcccatatcagtttctattttataaaattatccgtctgttcgtcaatatacgggatggcatcaaaacgaccttgcagatatgccttttctgcatccagcccgtcacggaaatctttgtaatcaaacagcgaatacaaatccgaggacccgtcatcccgtttgttaacaaaatatatctgatccttacgtaacttgttggtattaagcaggtatgtattgtgtgtagtatatatcaactgcgccgattcgcttttattgaacaaaccgataatatattctaccagttttatatgcagctgcgtttcgatttcatctatcaacaagattttattattcttgacgatatccaggattgtcagcatcatattgaataaacgctgtgttccatcagactcttctgcaaaaaagttgaaaggaacatccgggttatttctgtgataggtcgtaatgaccagctgtggtttctgaatatcttctaccgacaatatttgattgtctgcagggtcaatcactgcagtcgaaaatactttattctcgtgcctgctgtcgattttgacaatgtcgctatcagcaattcgcagcacattaaggaactgttctttgttctcattcaacaagcgctcgacagagaacgaattatatccgaaataattcaaaataaaacgctcattgaaatatcgaaaaacatcttttgctgtatctcgatccatctgactggcgcgtgacacgaaaagcgtttttttggatgtattggcagcaacatccatagggcggcgaatcaccgagcggaattcatagatattctttttgtcgggtccctttgtttcatcacgggaaaataccagtgaacgacggccattcggataatagtaaagtgcctctttcagtatctcaactttattgagttcaaaagaatattcatattcgataccttcaaggaggaagcgaatgaagaatgtacttggcttgccaatgcctccgaatttgaacggagtaaaggcaaatatcgtattctcattgtaattatgagatgagaatatcattcccacacaagcgcgaatagccttgataaggctgctctttcctgacgcatttgcaccataaatggcaacagttttaagcaaccgctcatcaccgcatacaaatgtattttcttcaagctcctttgccttttttgtctgtatgcttgctgcctgcatatccagtaccacctcatctttaattgagaagaagttgctcaaacgaatttcaagtatcatttcatcccttaaatttgtaattgttttgcaaatatagcaaattaaatgacaaaatcataattcggacaatttttaatagattagaggtagcctgcataaagtattgttatatagggggcattcgacaagccaaagaatgatgtttctatatctgtgtgttcattcactacttgcaactcataaacctttttggttaacgcaatatgacacacttacagtggtttaactttatctgccagttgcatggttgatacgtatttatccgctatacagcccgattgccaataccccgactggcatttgtcataaggagcactgttcatacaagcagcaagttgaaacatgaaagattgtccgaaacgatacaaaaatagtatgttcaacgtcttgagaactgccgtcagactatcacagaaattactagttattcgactcttttcatttggaactatttcgtttggataattctcttcaatttctcgttctattcttgataagactgcctgtttgtgaatttgtcacaattggcaccatgttttttaatgaattcgcaaagattcttgtttttacaactggaagatcatatcctctaaaaaatgtgatattaccccaagttgtcatcaaaaaagtgtattatatactggttttcatcctcgaaaaaatgtatctttgcaaaagacaagtgaataattcttattttacacaaacttcatccacaaataaaaatgcgggattgccgggccacatatgccaggccggtaatttcggtgtaactctagcaataatccgtacataacgggtttccaccacagagaaagaaagcgtatgcgggtaaataccgtctttatcttccttgtctaaaaccggataagaggccgaagcaagttttcggtactcttttccatcttcagaacaccatacttccagcccggtggcatccattacggctgctccttttgagacgttgacagtcagcgataccgaagagacaggtgtcgacttttgtaggtcgatggtcagatccatatctttcaggaagccgagccagcggccggtgttatagttctgattaccctgtaatccgtcagtcagcgtgcttaccccgttgaaagtatagttctcatgtggtgcattggccagccaggaaggtttgaaagttgctttgtttacatggatatgttcctcaaatacactactggtatcctcagtcgtaacaataacggctttcagtttggtgtcttcccgtattatcaatggttccgtatagatcagggaagctgtatccggttgacttccgtctgtcgtatagtagatcgggcggttaccgatagtggaaagggaaatctcaagcgcgtcttgcaacgtgtctgtccggaagttctcggttatttgaaaaacatgttccgaataagtataatgagatttgtcatatacagttatcaaacgatacaaacgatccataaaagcgtcgaaatcgtgttgttcaggatcagcccagcctaattcgcttaacgcggccagacgtggaaggattaggtactcagcccgttccggggtatcaattcgctccgaccatagacaggcctgtacaccgatgatatgcttggcggcagcttccgataatgtatccggacagattttgaaatcatagacacggcgaaccccccggttaccacccagttccaataactggcggccactgaaataagtaatacccgctggggtcataatgacatcatgttgcatttcagccgctttgataccattttccgtacctctccatgacatgacggtcgcattgggagccaaccctccttccaatatttcatcccagccgataatctgacgtcctttgctgttgacgaacctctccacttctgtcataaaataactctggagtttgtcttccgctttatgttctttcgtatctttccatccgttattgtggatcaatgcctggcatttcgggcattgttgccagcggtcacgtggacattcgtcgcctcctacatgaatgtaatgggaagggaaaagctcaataatttccgataacacatctttcgcaaaacgaagcgattgctcattgccgacacataatacctccttatggacaccatacgtagtagccacttcgtaggggcctcctgtgcatcctagatccggataggcagcaagcgcggaggtgatgtgtcccggcagatcgatctccggaataacggtgatataacgttctgccgcatattcgatgatgtcctttacttcctcctgcgtataaaaaccaccgtatggttttccgtcgaatttcccgggaccgtcattcagtaacgactctttccgtttggaaccaatttcggtcaacttcgggtattttttaatttcgatacgccacccctggtcatcagtcaggtgccaatggaaggtattcaggttatggagagcgataatgtcaatgtatttcttgatgaaatcagtcgagaagaaatggcggcctacgtcgagatgcattccccggtagcggtattccggctcgtctagaatctgtacggccggaaaacttatctccttttgtcccgtcacggggagtgattttcgaagtgtctgtataccataaaatataccggcttccgaactccccgtgatggtaatgtctctcttgccgacttttagccggtagccttccggtgaagatacggcagtacgatctaatacgaggcgaatgctattggaagaacccgtatctgctgttacttctgtttcgatgcctgtcatttcgcggatatatccggaaagaaaaaccgccgtttgtctcagcttctcgtttccttccggatatccgatatgggtggatgtgctcaatataaaaggggcctctttagctggagtgatcgacttcggcagaggtactacctcatagttgcatgtcgcgatggcttcttttttattgcaggaaagtatcccggcgcaaagcagtattgctgttatatagaataatagttctctgttcataattggatcacggattttttaatatacacttacttcatccataaaaaaccaggcaggataacctacgccataatgccagtctgggcataatccgatccctttgacctcaactttgatgtatctggccttgacagggctatccgactccgcttttccttcgacaaatttaacctgcaggtcccggtcttcagcaaatgtaaacgagccgaaaggtttgtatgtcgtattgtccgaggatatagaatagctgacactatgaggcaataaaacccagccacctagttggtggaggaaatccgcttctatccgggtgaaacttttctcttcgcccaggtctagaatgaaagcaccgtccgtcccgttccatcctacccagctttctacatatgttgttcctccgaacagttcgtcggtcagggctgtttcgcccaatgttttataacgttcctgaggcgggatgatccaggtgagggaggcgccggaggccttgctttgctcgttttgcggcaagaatcgtttcttgtacaattcacaatattcgccgggtgcgtttttacgttcattcaatgacgtgacgccgaactgacgggtacgccggtcgaatagcccgagtaattccctgatcttcgttttatctgtaccgacctgtgtacgggcgatctcgagttccgaatattgcagcgggaggcgggataattgtacgcggcgcaacagtacggtatctccagcgacggcttcctctgcctggtcgaacagttcgttgtatgttttcagcaaaacggggttcaacatgccatttttatgggatatcggagaatcatatatccataacggttgtccgccggccaacagtgcgccttgcatgatcttctggtattgatacaggtaaggggcggccgctccgtaataaccattcatgaaggtacgcatcagggagtcggcgttctggtatgggtcccacattaattttccgatcatgtaagcccgcatctcagagaaatccccgccccggataccatttacctgcgaaaagtgcattgtcacatgatttttcttgaatagttggatattcttttgcaggatatggaagttggggaatggtgagacgatattatcgaaattgatcccataatcccatacaaatatattgtcggatatcttcgaccatccttccagcgcttttacgaaatcacggccggaggcattatcggttaacggaacctcacgtttacaatctatgtcacacaacatgatgttgacgttgggtaacggtttcacatgcttgggcggctgcatggaatacagataagccaatgtggaaaattctttatcagggaaacgttcggccagtttattcaggaaccggatcaggttgccggaaggtgaaccttcgtactcgtctacttctttacaagccggacaggaacaattcgtattgttaccgtcgttctgactgaccgaaatcattttcatgtccgggtgagccttaaagatcgaatctagctggcgtacggccgcgtcgaatactttagggttggtcagacaccactggctgttgtgtcccggacgatgctcaccgttgatgaatgagtaatattcgggatgttccttgccaaaccggtcggacggcagaatacggttgaacgtgtgtacccacatgttttcgataaacatgtcttttggttcttccaagcggaaccatagcttatagaccgggtcgtcgttgttatagctgtaagtttggcgataacggaatgccggtgtttcttccctgtggatagcgggaagtgtgattgtctgcatcggagtcaacgtataggcctcttttgcaaaataggacacgcccatgtattgttccaataaggaaactacaccatagatggcgcctttatcgcctccgctggatatttgtagttgttcgtttgctgtcgttttcagcaaaaaaccgtcttctccggctgaggcttgttttcctccaatcagaatgtccccgcttcttgcctttgtatcagcaacgatcggaagcgtagcctggctgatccgtttgacaaagtcttgcagcaaggtggctgcttgctcgttcacttcattcttctcaactaatacgattcgtgaagtggctttaccatccttcacaagggttatctgtgctgataccctggaggaaagcccaaacagcaacatcagcatacccatgcattgaatcaattgtttcatggtaattgtttttatttaatggtttgtttctaaagtcattggatgatttattgtcagtgttgtctttaaccggatatctttacaagagcgcccgatcatcagacggaagtcacccggttcgatcacgcggttcaactctttatccagcatggacaggtctttctcgtttacagtgaagtgcaactcttttgtttctctcggtgccaatgatacaggctggaaatggatcagccgcataattggttgggttacggaagcgacctggtcgcgcaaatagagttgtacgacttcattggctgcgtatttccccgtatttttcaccgaaaaagtaacatggaaagctgtgccatgtactgctttcgtcacttttagtccagaataatcaaattcggaatagctcaatccgtgaccgaaaggaaaaagcggttcaccggtcaggttgaggtaatcgtcgctccgcccggtcggtttatgactgtaattgagtggtagctgggcttcgtggatcgggtaagtgatcggcagtttgcctgaggggttataatcgccgaataaaacatcggcaaccgcattgcccccttccactcccggataccaggcattcagtacggccggaacttgatcctgccattcagacatgaccacggcacttccaccgatcaaaacaacaacagtggtttttcctgttgctgcgactctacggattaactcttcctgccggccaggcaatgccagatagcctctgtcacggaattctccctcttcaatacccacgacaacgatggcgatctcggattcacgggcagcttgtacggcttgttcgatggactggtcttcattttttgtatccacgtcccaaacaaaccggatacgtgcgttttttgtattctcataaaacctgatacgaatgtcatattcttttcctttttcaaaggtaaaaggaactaatgtatgaccgaaagaggttttatatggtttgtctactagcacttttccatcaacggtcagctggtaaccgtcatttccctccagcccgagccgatatgttccggagacgggagattttaatttcccgttccattcgacagaaaaccaatcgacagccaggcaagaatccggggcaaacaatgtccatgagaattgtatgcgtttgtcaatccgtttcaaatcggggactccttcataggagatattattgaaatagcgcccttccagtcccggcagtccgtctaatgtggataaataataggttgggacggtcagatattccggattgattcgtttacatccctcttcgtaacggatgatagctcgatcgcccagtctatttttcaatccatcaagaatgctgactttgtcaacgcccggtccgctgtaccctcctaaacgggcttgagcggcatcttgtccgataagggcgatacgttttacttgtttggataacggcaaaacccgattttcatttttcaataacacgattgatctgcgagctgcttcgagagccagtttccggtgtgcggagcaggcattccacttctccgcctcattttcgtcaatgtagggatgctcgaacagacctaggtggaatttcgcttttaatacttgtcctacagccctgtccagcgcttcttccttaactaaaccatctaggcaagcctgtaagaatggtcggtgttcatcgtatgttgtctggaagatgacatccagacctccattgattgcatcagctcctgcttccgagaagttattgacggtgtgatgcaacttgtggatgataccgacagcatctgcatccgcaatcgtaaatccgtcgaatccccattcgttccggagtttgtcgatcaataaccagggattggctgtacaaggagttccgtctaacatattatatgcagtcattacagactgcgactgtcctttttggaagcaagccttgaaaggaaccagatgcgtctcttccaaaaatcgttccgtgaaatggatcggattactgtctcgccctccatctccggaattggcggcaaagtgtttaggggtggttatcactcccatttcttcaaaacttcttacaaagttgacacccatgcatgccgaaagatatggatcttctccataggtctcttccgtacgtccccaacgcacatctgttgcgagattaaccacgggcgatagtatttgtcggataccacgtgttttcgtttccatggcgatggcatgggagacttggcgtaccaaggccgtatcgaatgtggcggccaatgcgatggattgggggaacgccgtggctccaccacgaatcaatccgtgtaaagcctcgtcgaatgcaataatcggtatgcccagtcgggtttcttctacgaagtaacgttggatctcattgatttttttagccatctcttttgctgtcaatttcgggttgtattgcagcaattgtttgagttccggattactggttcctatagttgaaacctggaatccgaagataccgtgggaaaagcggtctttccctttatccagctcaccaggcatcatatatgtttgccagaacttctcttcgatcgtcattctccctaataaatccttcactcgttcgtcaaccggaagtgccggattcttgtaaggaggtatttccttgaccgaagtgaaagaacaaaggataataattggaaataatagtaaattagtaggtttcatgatattaattatacttattgtaccgagtacatattgtttatcgcgtgcaaaattcaaaaaaatcaggtataaaagcaaacgatcaagagagaaatatattaataaacagggtatgactgttatgttcgattgtttcgctatctttttgacaagcacttttaacaaatgaatcataatagtttgttaaataattagaagtcattttgaaatgaataaaataaccttatatttcaatataaaaataattaagtatcagcaaactaaaaaatatgatggttagagtttacagtatcaatcaagttaccaatggttattgaataacttgaatataagttcctgcgcctcgttaagatccttacagacagagagtgccaaggagcgcttgggattgggttacggacaaattcggttgggttgttgaagccgtactctggctaaatgagcgcccaaacgaattccttgtcttacctaagagatggattgttgaaagatcgctctcttgttgaggaactccagaagattaactattgattataaatatctgtgtgagatggctgaagttatgtatcaactagctttcatacagattatgcttaaaaatatttctaaggatttcaatcttaaatcagacacaagagtatggtaaatagtgacctgtgccaaataaatcggccttattttggtagaaagattgcctttcgtttagagcgggaccatgcatacttgaggttgttttggtctctggatgaaacttgtcccagcggaactaacgtgttttagatacgttcaagatttgattttcttggtttcaaaaggtaatttgtgacaaatgtgttgtttttaataaaaaagcaccataaatttaagtatagtttacaaaaaagttgtatctttacatcgcatttatgcaatagaccatgaatgatacattagttccgctggaaccatgttcatattgtgatataacattacaggaataaatgtaatcaatctaaacttaaacttaattttaaaacaaaagcaagatgacaaagaatgaatctaagctattatcccttcaacgaatagctaaaacctcggcgttctgtttgttgctttccgctttttctgtaaacgcggcgatggccgttcctgcttccgtaggcacggttgatgaggtgatgggcgtacagcaggacaagaaggtgacaggtacggtcgtagacgaagcgggtattcccgtaatcggtgcgaacgtgatccaaaaaggtacgacaaacggcgtgattacggatctagacggaaacttttctttggagattcccaatggggcggtaatcgagatcagttatatcggttatgcgacacaggagatcacggcgagcggacagacgggcttgcaagtgaaactgacggaggacacgcagaagatcgatgaggtggtagtcaccgcattgggtataaaacgccaaagccgctcgttgggttactccacgacgcaagtgggtggcgaggactttacgatggcccgtgacccgaacctaggtaacgccctttccggtaaggtggccggtgttagcgtaggcggtaactcgaccggtacgggtggttcctcccgtgtgatcatccgcggaaacgcctccctgacaggtaataacatgccgctatacgtggtggatggcgtgcccttcagtaaccagaacttaggatcggccggcacatggggcggtatagatatgggtgatggattgagtaacatcaacccggacgatatcgagagcatacaggtgttaaaaggtgccgccgcatccgcattgtacggatatcgcggtggtaacggtgcgatcttaatcacgaccaagtccggaaagaaaggtaagcctgtgaacatcgagttcaacaacaacttgacttttaacatgatctacgactaccgagactttcaaaatgtgttcgggcagggtgattatggcgtacgtcctacctccgtagcgggagctgagaccacgcagactagtagctggggagacgttttaggtggtacggcgaccaacttcctaggaaatgaggtgccttacgagtatatcgacaattggccgaatttctaccgcacgggtatcaacaactcaacttccgcctcgctcagcggcgcgggagacaagatcacctaccgcttcggcgtatccaacgtagcagagaagggacagttaccgaactctagtaacagccagcaaggtatcaatatgaatacgacgtatgatatcttgaagaacctgcacttgatcgtgagcgccaactatgtgttcgagaagtcgaaaggccgttcgaacctgtccgatggcaacggtaataccaacgctaccttgctgcacttggcgaactcgttcgatgtacgttggttggaaagaggctcggcgaacgctccttggggttcctttgaggacggctcggaaatgaacggtaatggtaaccgcaatgtatatttcaacaacccctactggttgcagtatcggaaaaccaacgatatgcagaagaaccgcttgacgggatcaatgaccttgaaatacgacatcacggattggttgtatgtgcaaggtgccgttcaacgcgatggttacaacttggagttcaaacagatacagccgactggagccgccgcggatccacaaggctggatgacggaatactcccgtagcttctccgagatgaacttgaactacctgatcgggttcaataaggagtggggcgactggtcggttggcgccacgttgggcggtaaccgtcagcgtacgatcaacaagatgttctatacgacggatggaggccgtccgtttatcgtcgatggactgtggtctgtaaataatctcagcgataaacgatcgaagaaggactattcggaataccgggtgaactccatatacgctacggcggacttcggatggaagaaccaagtgttcttgaacctgacgggacgtaacgactggttctccaccttgaacccggatagcaacagctatttctatccgtccgtaacgctctcgtgggtattctccgataccttccgtgacaatatgccggattggttcgatttcggtaagatccgcggctcgtgggcaagctcctccaatggtacagatccatacaagaccttgatggtgtataaggtacagaatttccagatcaacggacagaccggaggtacggcaaacagtaaccaattcgcgaatccagacttgaaaccggtcagcatcaaggagtacgaggtgggcttgaacctagcgtttatgagcaaccgcctatcgttcgatatggcgtactacaacaagaacacgacagacgatatcgctgttgtcaccacgtccagcgcgtccgggttcggatcgaaatacatgaacgtgggcgagatccggaaccaaggtttcgagttcatggtgaatgcgacaccggtgcatacgaagaacttctcatgggagacgaccttcaacttcgcatacaacgatagtgaggtgaaatacctgggaggcgtaaagtccctgtctatcgacggagcctccgcacgctcgggcaacgtgaccgtccgcaacatcgtaggccagccttacggtatgttggttggctacaaatacgcccgtgacgagcaaggccgggtcatccataagaacggtatcccgcaagcgaccgacgagttgcagaacctaggcaacggtgtctacaaatataccggaggatggagcaacacgttgagattccgcgatttctccttgtcgttcttgattgactacaaggcaggcgcgagcctcttctccggcacgaactactcgctctacagcgagggtctgcacaagggtacgttgcttggccgtacagttgataacccgggaggcagtggctttatcggtgccggtgtcatgatagatgacaatggaaagatccttggagagaacaacgtggcggtaaacgcacaggattatcacaaggggatcgtcaacaataatatcgccgaggagttcgtctacaatgccagcttcatcaagttgcgtgagttgtcgctcggctataccttcccgcagtctgtcttgaacaagatgaaggtggtgaagggcttgagcgtctcgttggtgggacgtaacctatggactatcttgaagcataccgataacatcgatcccgagtcagcttacaacaacacgaacggacagggcttggagttgaacggttatccggccacgagaaatgtcggtttcaatgtcaatgtcaaattctaatcacgtttgaagaagtataataatatgaaaaagtatttagtatatatgacgtgcgccgccgcggccatgatcgggggaacgggttgcagcgatttcggggatgtgaatatggacccggagcacctgaattcggagaatatcccgaccgagttattgttcaccaacggtcagcatcagatgttgggatctgattgggacgtatggcgaaacggttgtatctatgcggctcaatggatgagccataccgcatcgttcaattggttgggtaatgcgaattacacttggaacgacggctactcaggtgcgtattgggaaatctacaacggtgacacgcgcggggcgctccgcgacatgaaagatgcggtggaggcttggaaagaggatccgtcacggcagaccgattaccaaatcgctcgtatcatgctcgcctacggcatgcaccgcatgaccgacctttacggggatatcccctactcgcaggcggtacagccggagttgtattcctttccggagtatgacacgcaacaatctatctatatggatttgctgaaggaattgaacgaggcacaggccgccttgaacggcgcatcggcggcagcgatgaaatcggcggacaacttctaccaaggcgatgcctcgaagtggcggaagtttgccaactcactgatgctgcgcatggcgatgcgtatgtcgaaggtagacccggccgcagcggagcaatgggtgaagaccgcggtagccaacggggtatttgagtcggatgcggacaactgcatgctgatgcatgcgggtggcttgacaacgaacgactcctccgagccatacgccaagatctactcgcacgaggatcgcggcaacttcttcctgaccgagtatttcgtggatctgttgaaaagaactaacgatccgcgcctgccgttgatcggtacggtgtgcgaggatccgaccatctcggtgcaggcgggtagtgacttccaatatggcaattccgatccggccgtccagaaaggcttgcctagcggtttctccgacagccccgatagcccgtggttcgtaggtaacaaataccccgagttcaaggacgaggattaccgcagcacgtacaggagccgttattccacgataaaccgttatacctattccgacccgacgggcccgacgttcgtctgcacctatgcccagacgcaattgttgctggccgaggctgccgtacgcggctgggtagacgggagcgcgcaggcttactacgagaacggcgtacgcgctgccatgcggcagttcgcacagttccccaacggcacggcgctgtataatcagtatctgacgcaggccgcgatcgaccgctatttgacggagaacccgtttaatgcatcgaatgcgttggaacagatcaacacacaatattggatcaactgtttctgcgatgaatatgagacctttgctaactggcgtcgttccggctatccggaattgaaatcgacctatgacgcggccaatccgtatcctaacgcagatacgaatggcgagatcccccgtcgtttccgctacccatcgaaagagtcgcaagacaatgcggctaattatgaggcagctgttagccgtctgtccggtggcgatcacttcagttctcgcatatggtgggacgtggcgaaataaaccaccctattgatcatcgcaataaaaagaaagaaaatgactactctagtagttacaaattgttattataaagccaagaaatggccatattattgcttgacacattaaattgtacagatagtagtagtataaggtactatttttgaataactgatggcatgaggggataagaatgagcaatcatcttatcctctctttgtatattcggttagcctgtttagttacatagaattaatgtacactgaattttagtgtgattatcttactattatatcgaaacaggtacttgttctcgaaaaaagcatttcttatgaaactacaaaaaacataaggtaagatataccatgttccatctttttcgtaagcgactacaaaaccgtctccaaccatcgatgatatacccttgtttccttcctgccgcatgtggcaggaagcagggtgatttttaatgtggcgatactgtgttaatagtagaatgtggtcagatgtgttttatgatcttttacaatctttactttctgcatctgtccgtatatttcacgcacggataccggacagttcatcttttcccactcttccggggaaatcctcatatcggaatgcctgaaacatagcatgaccatctcctgggaatcctcttctacgaatatgaaaccttcatggtcattgacaaactgcttgagtccatcctcatccttacaggatatttctccggtgtacatatccccgcccgaccgggtgtttttgcggatatggattttgaaccattcctgactttccggctgttcaggtgcgccacattcccacagggctactttcgcatcgtagtaaacttccccgttttcacatgtcccgtaatgtccccagtgcttgaaacggccggtagtccaagtcttgaaccttacatcaccggtctttaccagcacgcactcgccgccatgcatatcgcatttgatgcccttcttatcccgggacacgaatgggacacgggagaaattccggagcacaatgttatctccatatgcggcatctacgaagaacggccgggaacgttcaccgtatccggaaataaggaacaggctgtcacctgttcggggataccggtcggaacgtgtcttttcgatgtgttccaccattgcgttcactttctctatgtcttcccggacaagcccgtgtatctggtcataccagtagttcagacggatgaatgtttccttgcaatacttgttttttgtttgaatcatggtcttttttattttatggttaaacatgcccggctttggtaaagccggtatttcttttcttacatgcatccgtttgtcttttgccctgattgtgcaaggcttggcgaaaaaataccgcagcgaagcgaggatgattttttcagccaaccagtccgaaggaccgccttgcacgatcaagggcaaaaggctacctttgcaggtaagaaatagaaatgcggaacattgcttgattctaaggtggaaaacctttgtctcgcaacctgatatatccccccaataaaatccggcaaggaaaatctgtttttaaaagattccttggttcatatgtcttacattgaacagtataaggaagcacttgaagtccggatatttcccaaacggacattaccggttatcaaacgcctccaccctgtttctttccaacaaagcaaggatgtccttctccttatatagtaatttgcctcctatcttgtagtaaggcagtttgccgtttatcctgtactctgccagcgtcctgcgtgtcagtttcaactgttcggcaagctcacagtccgtaatgtaacgttctccattcagaaccggacgtaatttctcctcctgcttgtccagcatttcggacaggctgcctatgttccggaaaaaacgaatgatttccggggtttctttggtcaacagggattggatcatctcgcttttaaggggttatacggtgaatattgttttccataaaacggataatatcctgacgcttgtaatacaccttacggtctatataactgtaagggatggccctgcttctgcgaagctgcaacatctttctgggagaggcgtccatgagcatacaagcctcctggttgtcaatccagtcgtccataccggatatgccacttccgcatgtttcacacattttttttacaacggcttccagagcctcattcatttccatgaatgttttagcctcgatacatacaaactccataagtttcattttttgtcggatacgaaaatatgaaagggaatattcatgtccaaaaggatgtcgtcaaaagacatcagatgtcattaaacgtcatatgtaacagagagctgcagagtctaacttcagaaaaatgctctgaaataaatattatagtctttatatgttgaataccttgtgtggaagcgtcatcaatttatccggttttaagaatataggcggggtggtatctgtaacttgtaaagtttacattacggactttacaattttacacttcaaaattttacacttaccatccactgataaaaatcaaacaatattatttgcttgattcttagcagaatgtaatatataactaagttaataccggtactccggcatagatttttcactaaagatggcatatactctcgaaagtgcgcacaagaaagggtatttcagtaataacctttaaaatgcaggagatacataccatgatgtatatagacaatgaagtgcttgaaaaaatgataatgaccatagtggaaggttttgaccgcatagagaagaaactggacaggatggaacgtgtgaaagagttcttgaacggtgacgaacttttggacaactatgacatagccaggctgctcaacgtgtcgttgcggacagtcgcccgctaccgggaaaaaggactgatccgctattaccagacggacgataacggaaagaacttctacagaagctcggaaatacaggaattcttgctgaaacgcggaaagaaaaaatgagcgtgggagtatcaatatgcggaagttatgctaactttgtttcataaacagttgttatgaagacaaataccaattcaagatatgccgtcgcagtccttattgacggggataacacctccttcgagaagatggaggatataatgagttttgtttcccgttatggggatgccgttgtgagacgaatttatggagattggacgagaaaagcgctttccgcatggaaaggaactgcccgggagcatggattcaggctcatacaagcttcctcccatgctcccggaaagaacacgaccgatattgcactggtcatagacgcgatggacattcttcgtgacggtcgggcagactgtttctgtctggtagccagtgatggtgactacagcctgcttgcccagcgaatacgggaagccggattgaaggtgctgggatatggggaggataagactcccgtatcattggtacgatcctgttccgtgttcctgtatgccgaccggaaggaaaacaaggtttcggacaatactcccgaattttttatccaaagggacatggagtatttcgacaaggctttccggcaggcggctgacggcaaagaggaggttcccctttcactgatcggcggcgcattaaaaaaaatgatgcccaaattcaaggtcaggagatatggatgcaagacattgggcaaactctatgaaaggctggaccggtatgagctggtcatgactgaaaagggagtggcaagtgccgtgcggctgaaaggctgaaccgcacggcagaaacaatcaggaaccgtcagttttcttttatacatggcaagaatgcataaaagaaaactgacggtcattgtctataccggaatgggatttatccgtagtgtatcgagattgagataggctccccggtagaatgtccttccttccctgagcatacgccacaggatgtcgcagccggtttgtgccagcatggaattgatgaaaaggtcctgcttctgcaatgcttccgccagcgagcagctcggccccgaatccttttccttgatggtggagtagcgtacctcttcggtaatgacattcatacggggaacgggcaggtattcgttggagacgggctggagaatcttgccacggatgttccctatcaggacctgtccggtggtccgggcattgccgaagtccatccagtatatgggcgaccgctcgttgttggaagtgtgttcccggtgtttcttcaggaaccgccagaggttcatccgggagcggatgttgtcggtgcaggtgacgatgatgttcgccagggcgggctcttcccggtctgcggaggctttcagcggataacgctgcccttttgcctcccacgagaagccgaaaaaacggttgatgcgggtcacaagtgccacagccttgttcaatccgagttccgatccgctgaacaactggcgtccgatgttcgcttccgtgacggtatcggggtcgaagaccgtcacgtgcagccccggatgtcctagcgcctgtaatgccacgcttatccgcgccaggccggtggccacctgtgagcctgttccgcccgcaccgattacgaagacggtcacgggatggtagggattaagcaggtatctgtctgtataatgaatctttttcatgccagtaagtctttaagttgtttgttcatgggtttcaattcgttctcgtcaaacggattggcgcgtgccttttccgttaccgagaccaggttgcttccggtcgggttcctgcttcctcccagatgggagaattcgctgagccagaaacgtttttcccaatactcgaggagttttgagaaagtcatgtcttccgggggagtcaacgtggcatttcccagacagacactgctgcccgtgacattgaagaaaggggcgaggaaaagcgggctgttttccaccggtttttcccccttataggagaaaatgtccagcctgtcaccggaaaccttgtagatcacgccaggcacatgaaatatcccgtcaggaatattcaggcttccggcaaagaacatctgccgttttcccggaggattgtaccagatatacctctcgtgccccttacgggtatcacaccacaacatgttggcggggattttcccgtgcggcacgttccgcctgtcatccgtataggattccaccagggagtccatgaactcataggtgacaggcatggcagcctccatcctgcccctgtcattgatgggatgcagttcgaggtaatgcattccgttcccatagcggttctcacggtattcatacgcgatcagtgccgccttgggcaccatcacctgttgtaatttattggtcagttcattcatatcgttcattttagaagttgtcagctatatgttttgtaaaacgtgccagccatttggaaagcttttccgggtagtcgcccatttggaagagacagtccgtttccggtgtcaggaacctgtatgtgaccggggtaagggcataagtctcctggtagtccgaattcatgaacccttccatgcattcagccagcgtgtcacgggtagagtagaccagcatgacctggctttccattcccaccgggtaaaaatcacgctcctcctcatacgcccaatcgtacaggtaatctgtgaggttcgggctttccggggtgatcagtgccataccctcccttatcaattccagtagtttttgttccttccccttttttgtccggtaattccgtacagcctcttccagagagttgcagaatggttttcccgacatccgtttgagcgctttcgcccgttttcctgactggtaggaatccgccagccgcttgttcgccctgatttctttcggggaggcgtcggaatcccggttttcccagtcttccagttcctctatggcgaagtcatagcaaaacgcctcggtgacattgcagactctgtgatgccggacgaattgccggatgaactccctgacaatgttcctcaatggtattggaagccgttccgtaaagtcgatggaaatccagaacaatgtgggttccggccagtcgtgatggcggaacagacagaaatggagccttccttctttctcttcaagattgacacattccggtacgctctcctccatcaccttgtacagttcggtgattttcagacgggggctgccccctttcctgtatcggaaagggagctttatacccataagtccggcatagttcgatgccgattggtagagatagtcaaaattctccggtgtcgtgagattgaccggggaaccgtcatatccgtccttatgccaaaaatccggtgcgaggggaggaattttatctgtcagaaaatcatgacgcttcccggtggcggcagtatcctccttttttgtcccgatgttcctcttcggatgtctgacgggtcggccgagcggataatgagtcccgccaggttctccttggttgattctgagagctgtctgcatggtttgtcctcctttttctttctcttatccatacgcttatcctttcactccgatagttgtcttgaagcggtagaccgccttgtcttcctcccattccggtccgtggacggtcgccgttgtcagttcgggataggtcatggagtagaagtccatcacctcgtttacggacaggctgctgttcgggtcgctcaataccagttctttagagtccttcctgaatttgaaaattctctgcaatcctttgatttcaagtgccataatttctcttcttttataaggtttaacaatataccatatccatttgtgccatgtccgtcatgcggcattccttcggaaagtctggatattccgcatacgggtcttccctgagcatttcccggtcgtcctcgcagtccttgtcgaagttgtacatcgcagcctcttgcggttgccggagatattgctcctcataagttcttgcggcctcctgtaccggtgcataccgtggttgtggcgaagccggttgcatccattgatttccgtccatccgtgcctgtggcatctgtaccggttgatggaactggattccttgcggttgtggaactgcctgttgcgggaccggttgcgcttgtggtgcgggctgcgtatattgtacgggttgtgtttgcggctgtctggtaaatggcgtttgctgtccgggatgtacaaccgaccggggcggttgcggttgtgaaacgggttgcggaaccggagccggctgctcgggcaagaacatcgggatttgctctccgctccggtattgcggtgccggggctgccgccggttgcgatgccggctgttgtggagccggctgcggcttggacattggcggttgttccatgccgaacaggcttccctccgatgcctttttctgtacttccgccattttttcgtcgatttccttctgcttgtccggaagtgccagcacctttgcctgtttgagccatgtcaacgcttcggaatagcgtttgccggtcatggcatcctccgccttcttaagcagtttttccatcttttcccgtttctcgcggacctctttggactctttttccgcagcagacctggcggctttgctttgtgagacagcctgttccgcctgcttctcgaacgtttccaggttggtaaggatgccctgcgctttctgtacaggtgtgccgacagcctgcaggaagcccgcatccagctcttccggcgtgccgttcaggatgagcggaacgatgcgctccccgtcctttacccccgaccgcctgggaacaacggccaccgtcaggttgctgtttactcgtctgatgttgatactcaggtctgtgcctgccgtgatcatttggttgattgcttgaaaaaacataatggtaaaatttaaaatgttatacataagtttccttgaaaaaatccttcaggattctctgcctgtccggatttgaggctacgcctctcaacgactccagatagtagccgatacgtttcggtccatccgtcgtatcgggaatccgttttttaacaggtctcacacggtttgtggcgggccatgcagccggcataaccggagccggcggggtgaatgtagcggttctcatgtctttacgctttaaggattatacaagcatgcccatgacggtcagggcaataattatttttacaatgagggtgaatgtcctgaagaggaggctgatgagcgttcccgacaaaaggaacaggacgggcagatacacgggaatgatccccttgctgtagagcaggcatattcccgtaagcaaaaccagtgagaccgtttgcttgcagatgttttcgataagttgtagtttcatgtctttaaatttttaagaatgaataatcccatcgggatatgttttcccgattttataggcctccggcccttggattgcctttttgcgcaaggcttggcaaaagaaaataccgcagcgaagcgaggatgattttcttttagccaaccaagcccccaaagggggccgccttgcggcaaaaacgaggcaatccaagacttttgccgcttaaaagcggaaaaacgtatcttacacatataaaaaagaagtacagacagactgtctgcacttcccttgtcttgttggctttgacatatgtttatgtggttccctgttgtcgctttttcaccggatggttccggaatatctcgccagtcacctcatttaccgtttccagcacaccgtccaggaacttttcctgcgagagttccccccgttctatccgtgccagttctgtttcccagcccgaagtgagggaagcatcggccactttcatactgcgtaccgtttcatacagaaaaagccctttaggggtcgggacgacatatttacccgaataacggatgtatttacgttccaacagcgtgcggagaatattcgtgcgggtggagacggtgcccagtccggccttgtccatataatccaccagttcctcgtccgtataaggggaaaccggtaacgatttcttatgtataaggctgcatcctgcccccggcaggatctcttcctgaaaaagatccggcatcaccaggtaaggcatacagccttttgcgacaagatgttccctctcgaaaattccgagccatcctttttccaagatgcggtatgtacggatgcggaatttacgtgcggcacacaccgtatcgacggttgtgtattccaccttgcagggcggcatgaacgtttcaagcatcctgccgacaatgagcgtgtaaaccagcatttcctcccggtccaatttaccgggctgtgtgcctgtgatgatgatggcatgatgctccatggtgtcttgtgcctcaatactgtcccgtggcgcggcaaggtcaaccgtatcggcatattgtcggaactccttgcgggacagcatcttttccatgacaggcggtaacgtgtcatatacatcctttggcaacaggcgactggaggtgcgcggataggaaatcagcttcttctcgtacaggccttgtgcaatctcctgcacctgtatggccgtcaggctatggtaacggttcgcatctttctgcagttcggccaggttgtaaagtgccggtgccccgatttcctccgtccgtttccctaccgctgtgatgcggacactttttgccgccttgcaatcctcgtacaatgccagtgcctcccggcggaccacaaggtcgtccacgtggcgcatctttaagatacggtcattcttgcataggctgatgaatacgggccagctgtcagccggcatgtggttctccctttcccggtaccgtctgcatatctccgccagtacgggtgtctgtaccctgcccagcgaattgtttccgaagcctaccgccttgcagatggcatagcttgaattgacccccaggagccagtccgcccggttacggctgtccgccgcaaggaacaggttgtcgaaccgatcacatggtaggaggttcgccataccttccgtgatggcctcgtccgtcagagacgagatccagaggcggaggcagggttgtttgcatcccagaaaaccgtaaagatggcggaacagcatctctccctcccgggaggcatcggttgccgcaataatggtgtcgcatgcgttgagcaccttggcaatcactttcaactggagcaccgcattgatgtcgggattccacccggtatccgtcttcacgtgccttactgtcaggaaggaaggcggcagcaggggaaagtccttccactccacatgggctgttcctgaatccttcggcattgcaagggaaagcatattgccgtatgtccatgtcaccatgtagccgttcccggtcatataaccgttctcttttctgccggctcccaacactcttgctatctctctgcccacgttgggcctgtcagtcactattgcgatcatattctttttctttttgatgccccgtaccggattgggcagtacagggacaggttaaacttattttatttttttgttatttctttggagattcctcctgacggatgccgttgatttccatgattgtcctgttgttgtcaccgggtaccagtttgagtgtagcgtccatggtcaggctgattaccggggtacagagtttcaatgggatgatttccgactccttgccttgcaacaacaggtcaaggttgccgtccgcttccagttgctccttgctgatacccacggccttcaggccgggccaatcaatatcttttacattataattataagggatgttccgattcgtattcatacggtttggggatttgatgtttgtaaaattcattttgtttctctctgattggggttataccgcttgttttgcgcccttcttttgttcctgctgctggccttgggcggtatccgcctgtgctgcacgacgggaagtatccctgcgaatatcagggttctcttggaaatactgcaactgtccggaataagggtttactttcaggtaggaactgaacgtttgcccgttgtttttcagtccttcgaccaggagggtcttcccgtcctggaggttcgccttttcctgcgccgtgaatacatggccgtaaacctccgccgggatacgtggtgcctgctgctcgttgaacccatctggcgtgcgtgagtacatcgtcctgccggtattcatgtccagcttgacaaacgcggagaattcctctcccttacggttgatcatgttttccagatagacggcctgccccttgcgcaggacctccttgtcctcggctgtcagctgcacgttgcagatttcctttggaatatagatttctccggtttccggattatgacgggtgtaattcggccgtcccgtcgtctggtctatcgtgacaaacgcggagaaagctccgtccctgttcttgaacttcatgtcctcgaccaggatggtatgtccctcgctgagcatctttatctgggtaggtgagagcggcacgcccccgatggacttctcgttgaatacctggttcttcgggaagatgaactccagccccctgcgctcggcactgtattgaagcgtggcgtcaaactccttccccgccttggaggtcatcccctccaccttgacgggttgtccctccttcagcagtctgatctcctcgtccgtaagtcttaccccgctcacttcctgcgggatgtagacatgttcctgccggacagcgaccagctcgttggtgtttttgtcgatggagatcaggcagggggtgtactcgctgccacgcaggttgagttccaccgcacgtcccatgttgccggtctcacgcaggttcttcttgtcttcctcgctaaagttaaacccgaaataagggcgttccagttgcggttccttgcgtataccgtgaacggccagccccacctgcccgttctcttgcggtatgagcgagagcctcgcgtccagtttggctgtcagcacgccgggaatgttaagtgtcagcggcaccagcttgttggtcttgtaacctctcagcatggagtcaagaagtccttgctgttcgagtgtcgcctttgagataccgatcttgtccaatccctcccagtcgatcatgttctcattgtaacgatagcgcgggccttgcggctcttgtggcacctgctgtgcctgcggttgctgttgttgctgggatgcttgttgtacctcactctgttgcaggggttcctgcggttgcgtttctttttttgccatggctgtctcttgtttgttcatgttttgttcctctttgttctctctcggacggatctcgtagcgtttgaggaactccttcaccgcgtccgtctttttcccttccgccaggtccttgatcgcctgcttgttcaccttgtagtcgtggaaggtcatgcgaagcaggcggaaatgggtcggttccttgaactggctccagaaattcttgatgaagttttcgagtatgctcgagttcttgtcgaatttcaggaatgagttttcattcttctcgtccgctggaaccgtcttgaccttcccgtccttgtcgatctcgctgaccacttgtacaccggctttcggatcgctcttgttatgaatcatcatcagctcggtgatctgttccaccaaaggggcatcgttcatgaccttcggtttccggggccgtctaggcttttcgttcgggctcttttcttgtgccataccttttctttttggggttaataaattgctttgacacttcaaaaatatgggctaaatccgaataaaacactgattttcaaaaaggtgtcatcaggtgtcatcagatgtcatcaaatgtccgaaagactggttttccgtgagagaaacatgccgtgaaaacaaggatatggtatgcaggggaagggcgaaaaagccggcacgggcgcaaagggaggattatgcagagcagagggagctgaagtccctgtcttctcatggggcggcgtttttttcataagacattgccaggtctgcccatatatcccgtacttcctgccggatttattagggatataaaggaggccctccttttttcatcaatgacacggtcatgcgtcgcgtcggtcgcagtgagtccctataatctttcccgaaatcaaaaccattgtccgggcgtttgtttccatgtgtattttccgcgacttgtcgcaaggaaaatactcatggaaacaaacgcccgtgacaatacggttttgatttatctttgattatagggaactcgctggtatccgtctgtttttcacgaatttcccagaaaacatatacagtcttgttgtttatacgaaaaaaatatttctagacttgtcccacggaaaaaatgtcgctttttattttcggactttgattctttacgaggctattcggactgtctttcaagatgatttacagagtttggcatcggcagcaagtgatattcggtgttccaagcggagaagcggaatctaggactaaatattttcttccttcaacaatatagcccacgggttgtatctatgtacctattattcatcataaaacagactatatatggctaccattaaattaaaattccgtccatcgacggtacagggtaaggctggcacactctgttaccagctttgccaccgtcaggagaacaggcagattaccaccgacatgaggatatttcccgagtggtggaatgagacgaaacgtgaacttgtcactgtccccggcaatgagagagtcctgaccgcctaccggaagcgggcggaaaaggagatgcgggacatccgtgagattatccgtgagctggactgtagcggagaaacatacaccttgtcggaaatactcaaccgctatcgctccctgccttccgagtccggtttcctgtactacatgaaaaaagagatggaaacactttgggagaacggccaatacggtacctctcgtaattaccggcgtgcactgaacagtttttccactttcctggatggtaacgacattcctttttcgtcgttagattccgccctggcgtgtcggtatgaggcatggttgtggcaacaaagggtagcgagaaacagcagctcgttctatatgcggattctgcgtgccgtttataacaaggccgtaaagcaaggtattgcggtgcagacttttccgtttcgtgaggtttatacaggagtggctcgcacatcgaagcgtgccgtggatgaggaaaccatcctgaaacttcaaaggattgacctctcggattcaccggctttggcactttccagggacatgttcgtgttcagctattgtgcccgtggcatggcgtttgtggacatggcatatctgaaaaaagagaatgtggacagcgtgcgaattacctattgtcgccataagacaggccaatacttaacattgcatatcgaaccgtgtatggcggtgatattggaacgatatgggcaggtttgtccggaaagtccatatcttttccccatccttaccgatgaacagccagatcaggcttaccggcaatatcggaccgggttgaactaccataaccgaaaattgaaacggttgggtaaattgcttggcgaaccattacctttgtcctcatatacgcctcgtcacagctgggctaccgccgcacgcaaccacgacgtaccgattgccgtcatcagtgcggggatgggacacagtagcgaaaggactacgcttatttacttggattctttagacaatgccgtgatagataatgcgaacgagaagattttgaagaatttgaacagtaccgtctctatgtaagagagggtagaaatacaccgcaaatgtaatcattttcagcaaaaaagaaaaataaaacagccatttaattccttttattttacccccccccatttgtaaataaatgattatcaactatttacgattatcatttaaagcaaattaaaataatattgtaataaggatgtaaaataaaaggagactgtctatttctctttcgagcgtatttttgagttgagaactgagcagaccgagtaaaaatggattcttatacaaacatacgcaattgattatcaacaataaagatgtttgtaccgtttcttacatagaaacggtacgaatacggggttacggtatccgctcactgtagtcaggagcggcccgcattctggaagtcctatgaaggaaaaagccagattaaccttgattgctgtatcttccttatttgaaaaaacagaaggtgcaggaatggaaattatatcctttttattaacccagcaacattactttttgttgaacatagaaacacacacacacgaacattggttcgccctaaaagtattttataacaaagttttcgagattgaggatatattgaaaaaagacaagatcgagacttacattccttgtgaggaaaccttgatggaacgtaacggcataaagaagaaactccgtcgtccggtcattaattcgcttatgttcttccgttcaaccgtttgtcgtgctttggaagtacagcgacaattcaccaataaggtaatcctatatacaagacagaagggattgaaaagacttccccttgccattcctgatcgggaaatgaacattttcatgctggtcacctcgtccggcgagcagggaatggaatatttcggagaggacaattccaagtttcaccagggagaacgtgtacgggtcattgacggaaagttcaagggagcggaaggggttatctgccggattaggaagaatcgccgtttggtggtcaccgtccaaggcgtatgcgccgtggctacttcctatattccacaagcctttctacaacggatagggcaagattaagaaaatcatcaaaagaatcatatagtggacattcttcattttatcgaatttgcctttatagtcatagtcggctggacattgagtgcgatggtcctgcctcgcatttcgttggtctctttccgacgtcgcctgttcgactcagtggacgaacgtaagttgcatactgcccatataccaaggttaggcggtatcgcctttttcccttgtatcacagttacggtttcgcttgccattatcggttacaacctttggcagggctataacatactcgacatggacttgacgaaccgtctgctttccatgctctgttgtctgttcatactttatcttataggtatgatggatgaccttatcggtgtacgttaccgttccaaatttgtagtgcaaatactttgtggcatactgttggtgatttccgggttatgcttcgacaacctatacgggttgttcggtatttatgtcataccttattacataggagtgccgttcacagtattcgtcatcgtctatatcctgaacgccatcaatttgatagacggcattgacggacttgcctctgggttgagtattatctcattcctcgctttcagctgcatgttcatccatttgcaatggtggatgtatgcctttatcagtctagctgctttcagtgtgttattgccgttcttttattataacgtatacggtaagatatatcggggacgcaagatctttatgggtgataccggttcgctcactatcgggatgctgctggcagtgatggtcatccgtctgagtatgtccgatccagtgaaagagagtgcctttcccggtagcattgtgatagctttttcttttttgattgtaccaatgcttgatgtgatacgtgtggttattcaccggttgcgtaacggtaaaaatccatttcttccagaccggaatcatatccaccataaatttatagccttaggaatgtcccaacgtaaagcgatggtaagcattgttattatggcagctctttttgcattgggaaattgttttttgattcattgcctttccgtaacaaacttgtttctgttggatgtggctgtttggacggtgattcattgttacataactatgaaaatcaaccgaaaacataaagtagaataattaactgtacagaaaaaataaggtatgaaatttcatttaattaaattgtgcttcttatgcgtgttgttggtgtcctgcaatacctccaaagaaattgtctattttcaagatatcgtagttaatcagcccgaagcgattatcggggcacgggatattaccgtgcaacccaaagaccagatttccattatggtgtccagcaaggatccgcaattggcggccctgtttaatcttacacgggtacaataccgtgccggatctaccgatttgcgtaccggaagtaacagtggtgaaatatccggttatacgttggatgataagggagacattgattttcctgttatcgggacactgcatattgccggtatgaccaagagccagattgccgccctggtaaagaaaaggctgatggaagagaatctggtaaacgacccggtggtcacggttgagtttatgaacctttatttctctgtgttgggcgaggtgaaaactccgggtaaatatgccataacaaaagaccagattactcttttggaagccatcagcgtggcgggtgacctaagcatctacggaaagcgggatgcgatatttgtcatccgtgaagaaaacggcgagcgtgtaacccattgggtagatatccgctcgaaagatctgtttaattcaccggtatattatctgaaacagaatgatgtggtgtatgtacagcccaacaaggtgcgtgccggacaaagcaccattaatgagaacagcgtgaaatcggtatcgttgtggatcagtatcggttcgttcctttcctcgttgggagttttactgttcaagtaatgtcgttaatattatttcataagctataaaagagagccaaaatgatagaaaatagaacgagtgtaggcaaatctgccgaagactttatacggttacaagatttatggggtatgtttttccagaaatggtattggtttgccctttcattattcgttgcattggcaacggcatcattatatttgttgagtactcctaatgtctatacccggacagcagccattttggttaaagatgactccaagaacaattcttcggcaagtgcaatgaatgagtttgcagatatgggtatttttaaatcaaacaccaatatcaacaacgaactgctcactttgaaatctcctacgctgatgacagaggtggtgaagcgtttggggctaaatgagatatatactgttcgtaggggcttaaaaagaatagagttgtataaatcaagcccgatattggtgacttatctttttgatgataaaaaaagtgtaagttttgatatagaagttggtgcacaaaacaagttttatctttcaaactttattgttgccggagaagaaacaggggaacggttagaagggattataggagattccattcaaacatcagcaggaacattggccatcagcttaacttctcaatatgagaattcttttacaggcagcactattcgatatagtaaagaatcggctgatatgatggctgacagctatacacagaaattgcgggctgaattaggcaacgaagatgccaccattatcaatttgagcattgatgatgcttctgtgcaaaaggcagaagatattttgaatacactgattgaggtttataacgagaaatggatccaggacaagaaccagatagcagtaagtacctcacggtttatcggtgaacgtttgggcgtgattgaaaacgaattgggtcatgtggatgagaatatctccaactacaagagtgaacatctgttgccggacgtacaagccgcttccagtctgtatatgagccagtctgctgagaataaaaaagaaattcagacactcaccaaccagcttgcgacggctcaatttattcgccgcgaattgggggggaaagagatgaaccagcctttgccaaccaactccggtatagccaacgtaaatatcgaaagtcaaatcggagaatacaacaagatggtgttggatcgcaaccggctgatagccaacagtagcgagaaaaacccgttggtgaaagatttagggaactcaatgcagagtatgaaacgtacgattcttcaatcggttgataatctgatcgtatcgttaaatactcagatacgcagtattcgccaacaggaagcaacaacaactcaacagttggcttctaatccgagtcaggccaaatacttgttatcggtagaacgtcaacaaaaagtaaaggaagagttatacctatatttgctccagaagcgtgaagagaacgaactgtcacaagcgtttaccgcttataatacgcgaatgattacagctccacgtggcagtgctttaccaacggcaccaaataagaaaaacattttattggtggctcttgctctcgggcttttagtaccggcagttattatctttatgcaagaaaacatgaacaccaaggttcggggtaagaaagatttggagaatttgagtgtgccctatttgggtgaaataccgttatatttccgaaacaaaaaaaagaagaataaattttcggaatatgcaattgtggtggaagagggtaaccggaatattatcaacgaagcttttcgtgtgcttcgctccaacgtggactttatgaaaagcaagaataccgagcagaaagtatttatagaaacctcttttaatccgggtagtggaaaaagttttctgtccatgaacatcgccatgagttttgccattaagggaaaaaaagtattggtgatagacggggacttgcgacatggaacggtttcggcttatgtagggtcgcctaagaaaggtttaagtgactacttgggaaacaaggaagtcgtttggaacgagttgcttgtgatagacaaaaagtatcctaatctgcatataattccagtaggaaccattcctcctaatccgacggaattgttggaggatggaagtctggcaaccttgatgcaagacttacgcgatgagtatgactatatctttattgattgcccgccgattgatattgtggcagatacacaaataatcgagcaatatgccgaccggacactctttgtggtacgggcgggattattggaccgctcactgttacctgaattggaaagtatttatcaagaaaagcggttcaaaaacctttcggtgatattgaatggtacggaaagtacaggtggacgctatggttaccgctatggttaccacaatgggtatgactcttattacggcaacacaaaatagaggggtattccaaaataaacaaggaaactgtttgctattattcccaacagtcaacagaaatgtgttttttccgacagaaaaaagtattagcggaaagcggttttttccgtggtttcactgattgccacagccatcttcttcccggggtagatgatggggtgaaaacgttggaagagtcgttggcgatattggaagaaatggaacgtttaggcgttcgtaaggtttggcttaccccccatataatggaagacatacccaatgaaacagtggatctgcaacagaagttccaagaattaaagcaaatgtatcatggaaagatcgaattggctttggcagcggaatatatgatggataacctttttgaggaacggttggaaaaggatgacttgttaccctttgaggaaggaaaacattatctgttagtggaaacctcttatttcaatccaccaatggagttactgtctattttgcaacgcatccaaaggaaaggttattatcctttgttggcccatccggaacgatatgagtatatgcggatgaaggattataaaatattgaaagataaccaaatttcttttcaactaaatataccgtcattggtcggaatgtatggtaagcacatagaaaagaaagcaaaaatattattaaaagcaggaatgtatgatttaggaggaaatgatgttcactcccttattttttatgtgacagcttgtaagcacaaaatagacaatctgtctttcttgaagaatgtgtgtaaaatatagcgtatttatattcgggaagactttgacctgatatgttttttatgtaaatgaatgatttaatatttaatacaaagataaatgaaagcatgtttcatgggcttgggttacatcggactacccacagccattattgccgcaaagcacggtattcaaataacaggagttgatatcaatccccatgtcgtgggaatgactaatgcgggacatctgcacattattgaacccggtatggaggaaatgttacaggaagtagtgaaagttggtatgttgaaggcttctgttacaccggaagtaagcgatgcttattttatagtagtgcctacccctttcaagggaaaccatgaaccggatgtgagctatgtggaagctgctacccgtgccgtattgccgttgttgaaaaaaggggatctttatgtaatagaatccacttcacctgtaggaactacagaggctatggcacgcatcatttttggtgaacgtccggaattggaaggtaagattttcatagcctattgtccggaacgtgtactaccaggcaatgtcatatatgaattggtgcataacgatcgtgttatcggtggcttgaatcctgaatctactgacaaggccattgggttctattcgcaatttgtacagggcacacttcacaagactaactgtcgcacagcggagatgtgtaaactgacggagaactccagtcgtgatgtacagattgcctttgctaatgaactttccttgatttgcgataaggcgggtatcaatgtttgggaacttatcaaccttgccaacaagcatccgcgtgtaaatatcctgcaacccggttgcggtgtaggcggtcattgtattgcggtagatccatactttatcaccgctgatttcccggcagaaagcaagttaatcagcgatgctcgtgatataaacaactacaagagtttctggtgcgccgaaaaagtgaagaacgccatgttggagtttgagttgaagaatcaccgtaagccagttgtagctatgatgggattggcattcaaaccaaacattgacgatttgcgtgaaagtccggcgaaatatattaccacgaaagtgatgcagagctgtaataatgccgacattttggttgtagaaccgaatgtaaaagagcataacgtgtttaaactgactgattataaagaggcttacgacaaagcagatatagtggtattcttgactgcacacacaccgttcaaagagctggaatggcgggaggataaggtgatattggatttctgtggaattttcaaaaataactaaagccctaatcaagtgctgaattaaaattttaattcagcactattcctcaattatgaatatactatttatattacaatactataaaataggtggcgttcaaaccgttactcatgtattgtcaaataaattcgtgcaagaaggacataattgcaatgttttaactcttacaccatcaaaaggagaagaaatacaccctatattaaactccagaattggtgtttcagtaatagattctcatacattaagtacaaaagaagcgataattcaat

SEQ ID NO: 637 - DNA, 37967 bp, Parabacteroides merdae
  source 1..37967: mol_type = genomic DNA
agatttgaagaaagatttacttcagttgtttatgaagtacaatgtttccataggcttcacttgtgcagactgtagtgatacatatggattatatgatgatcatatagttatacaggataataatagtagggaaaatgtactagaaactgatggatggtggttaaatataagccatttgcgataatttcaaataataagaaaggagtaataatatggcaattgatacagaaaggatatttcttttagcaactaaaaaaagccagcgagtggaaaatctgacctattgtataggtgtgcatcgattaggaactccaaacatggagtacattctaggagaaacagacaatgaccgtgaatataggcaaggtgatgaagtttcatatatttatcatgcggaatatgcctatacgttgcaggaggctctagattggctaaataatgtaaattagtataaaatgaaatcctcaataaatgtttaatgaagaattaaaatcctcgtattataatgaagataggatatgcacgtgtatcgactccggatcagaatccagctttgcaattggaagcattagaaaaggctggttgtgagaaaatttatcaagaaaaaaaatcagcgtttaaagaacgtcctgaattaatccgggcattagaagatcttagaactggggatatcttatatgtctggtcgttggatcgtttaggcagatccatgaaggaaatccggacgaatgtagatctaataatgaataagggagcgcatcttgtcgatgtaacgcataatatcgatacgtccactccttccgggaaacttttgatcccgatattttcaatgttggcagaaatcgatcaggttttacgtacagaaagaacggttgcaggttgggaagtcgcaaaacgtgagggaagaacaggaggaagaaagcccggcttaaatgatttagcgaaaaagaaagccgagcaggcaaagaaaatgtatctgtcaaaagatcccttctattcagcaaaagagatcgcttcaattctcaatatctccacgagaactttgtataaatatttgcgttctgttggggttgaaccaaaacaaaaccagtaaccggttatctcttaatggaaagtaaggtaggaaatcccctaccctatttccattttaacttgttgcaaagcccctttgagttctttcattgtgtcccttttgtgcttcttgcattcttccggctgaatgatttggaactgttcatcttggtagttgaccgcaccgcaaatctttccgtcatggtcgcaaatggtatcataaccgccaagtgtttcacttagccatagcataccgcaagagcattgcacttttattattcccatatatatatttttagttgattatttacatgtcttctattgtcaatgatttactaattaatatgataaggaaaggtaaaacaacctttccttatggctatttttttcctaaagtaccgtttatgaatttgcgtttatagcttgctatttctttcttattttcttccaaaaatgcttcaagcagatttcctagcatttgcatcattggaacttttgacattgtagatagtattttaagttcttgatggaactctctaggtatctttatcgtttccgtgtctattatctctcttttagcgaaaagcaaagaaagacctttaggaaaagatgattcgggaaattctgaaggttcttctgtcatattctcattttcctgaatgatttcttcttcttgtactggagcaacaactttagctggttctgtggtgctggctgctggttgtacttccggaattttctcttctgaagtctgttgtgatgaaacagattttatactttgaactttcttagcttcttctttaccagcctgtaccaatgcgaacattgatgttttgggttttcctgtatttttcttttcttcagccataatttcattttttaacgtaattgattaataattgtatcatttcttctccgaaatcatcacaggtgtgattatagttgtttattatcgtagaaaggtttctttggtaattaactttgctttccttgatatgattgttcagtagctcgaaaggtaaattgtctttgtttgctataagctctttatattcaagcaaattaggtgttaccttgttaggcaatccttttactattgttttgtaacctagactttctcgtttagataagatattttccttgtagtaattgtagaactttacagtgtgcaatacttcgatttttgaaggagcaaaaggtataatgaccacatccatcatcattagggtttctactactcctgcctgtttcaagtttcccggaaagtcaaccactattatatcgaaactttctttgagaaattctatgctgttaatgaagtctgatgaagatatactcattacttcatactcgtcttttatatcctcttcctgttgtgcttcatcgaaagctcttaactcccccattgtattttgcgcatcgtctatatcgacaacgccaatggttaaacctgtctgctcgtggctctcatgtacatatcctgcgaacaaggctgttaatgttgatttacctgttccaccttttgggttctcgaatgctacgaatatacccggtaatatttttcccataacgttacgagtttaaatttttcgcaatatatgaattaataatctaactaacaaattaatcagcttgtttaacaaataattaactaataatcttattacataaccatttaataaactaattagttaattaagtggttaattatacaattaatagattagttatctagttaataagttatttgatttatttattaattagttaattagtttatggattaattagttttctgataaactagttaactagttgtttttttgttgccgtgctttcagttcttccttttgttaagttatctggttacttggttaattagggaatcagttctttgggttgatttttccgaaagtatagatcttaaagttttggtgctttataatttttatctatctttgtatatgcaaggtgtggttttgtagctacaaaacccaccttgcgacagccgagctgacgagtgatgttcgtttcactcacatacattagaatagagaataggaatatagaatgaaagagaatagaactaaagttattcgggcacgtctttctgaagaagaaaaggaacaggttttcagacgagctaaagctgaaggtgtaacactttctatgtatttaagaaaatctgttttaggggaaaggataacttcaaaagcggatattcaaaccgtctttgaactgaaaaaaataggtactaatttgaatcaacttgcaaagcatgttaactctttacctgttgatgaaaatattcgtctttcattggaaagtatagagatgtacattaaagagttgaagcaaataacagataaactaatatgatagcggagatacaagacccgtttgtaggagaagcattaaaccgcaaaatcgattatcagttaaagaagattgaaagcagtgtagctagggaattatataattcttctggtgattctcttattaatatgtatcgtaatatgtcccttgttgctggtctgaatgatcgtgtgaaatcaccatatatagaatttattcttagcagcccgataggggaggatcttccggacgaaaagttttctgaagtagcgaaagaatatttggaaagaatgggatacggtgattcttgctacaccatcataaagaacgatgataaggaccaccgacatgtacatatacttgccactacgatagacttaaacggcttgtggatctctgatagttacagcaagggacgttctggaaagatcatgcgagagctagagcttaaacatgggcttgaagttatggagaaaggaaagtcttcccggaacaagacgttgggagaatcccagtaccggcaatatttctttgacacagctttgcacaaggctttgcgcagccataatgcaaaagaacgggtgaaggatcttctagggcagtcggaaacctttaaaacgattaatcctgatatgactaaggcttatactaatgcggaatggaaaatcatattgggggaagatacatacgaaaatatgttagatatgttatcaaaaggaaagttctttaatccattactcaaggacgagttactttccgtcatggatcgtttgcgtcaggaatgcggcaacatgaaagagttccgggatcgattggaaaaagaagggtattatatgcgtctggtatcggacaaggggaaatctcattatgtatatggcattcctgataggggcttttatctgaaagatacagcccttccggaatcgtaccggtttgggaaacttttgttcgccggaaaacaaatgaccgcagacgagcaaaagcattatctgtataacaagatctttgcagttcttaatggttcatccagctatgaagattttaaagaccggctagcggagcataatataaatctgatcgagcacgtcaacggtaaagggatatacggcatatcctttgcccttacaaatgtcgatactccggaaatctttaaaagctctgatgtatcaaggagattaacctatcagaacatacaagacttcttccaaaaagagcagaatccggaacagggaaaagaacaggagagagcaacacccatcgatccggttatcgtgtgttatgcgagtaatccgcacgaatgggagaaggatcttatctatatgtacccggttgccatgtcaatggctttagataacggatcagggaagcaccggaaaggtgatgaagatcttccggacaacaagaaaaagaaaaagcgaaataaaggattatcatattaataacaaaattgaatagaaaatgcgcaaaaaaaagaagcaaattagtatggaagcaaatcgcttcaaaaacgtaagcgaattgataaaatcgtttgaggagtattctgggttcagtattgatccggaagagatagatactcgtgataagctgttggataaaatttcggaaatacaggactatttatctaatgaagtatcagatatatgttctcagtattattatgaagcaggacaattaatgcctgaagatgaagattaacgtataacgaatcggaaatgaacgatatactattcaaaaaaataaaaagagcaaacagtaaatatgctgaatacttatcagcttgcgataaagtagctaaagcagcccaaaagcatataaactggaacgatagcgtaggttgtgcctatatgccgggtgacggtctttgcatagagattgaagcccatgtttgcccagctacaagattttttgagctacctgatattatcggtaatgatatgattgatgaatacacatatcgaaccaattgcatttaatttaaaacaagttaatcatgaactacagcgaagttttaaatccataccagccgttagaaaccggcgatttcatgtaccggtattatattaatgaccgggagtatataatttattcaccggaacgaaacaagatatcctgtttggagttgttcgatttcaaagatcttagcgcttatcaattatctatatccatccaagcgaaagtacaggtgcaatcggaaagcgaggaattgaaggagtttagttttgatcacgtatgtagcaaagaagatctgatagcttatctctttgatattactgaaggaaaaacggagatccggaaggtgagaaaggtttcaaataacgagggctatttcctttttgaactgaagagtgcgcataagattcggaacttttaccagttcaacccggaaagtaaagagtatcagctcgtgtttgacaatgatatttgctgtgcagcgatatatgaagatgtaacttctgatgtcgtaaacgtgtgctggaatcctgctatctttagtatattagaaggacagacagagcagcagaatacttcttatcttctgccttcttctaatcctatcctttgtgcgcatgtctgcaagaaagcgcaggagagaaacgctaggatcaatctgtacgtaggcaaaaacggcatggaagctcttttgttcttttcttactatatagcttctaaaggaattgagaaaagcatttctattttttccgacagtaagcaggtgactgtagaaatggatcgttggaatcctgttacggtggttaaacttatgtctaagatgcagaaaacgatcaatgataagttaaggaaacagtttggggaagaagatgaagtgaccatttaccggctggaatccgtagcggggaaatcttttcttgcttttcaaaaccatcctctagcaatagatgtgttctttcggaatatcatcccgttatatggtttggaaaatattgagtatatagaaatgtagcttgttgtttatctgataaacaagaaaaaattattctaaataggaaacatttttatagggaaattgttatttttgtgcagtcgtaaaccgaccgtgtttttacatattgaagaaaaaaagcgtttagctgatttctgtgcaagcgaaaagtccaaaaattgcattatacacagagaaacagataaatgctccccgtgatatgcggggggtatctcctgtttgtgtgtatagggcttggactccctcgcttgcggataggcgaatgcccttccgctttttttatgtttattggcttggtgtagggcacaagcaaaaacattatggcaatggaaaagacacagcgaaaacagtccctaaactctttgtcaaacactcctaagctgtttgacctaaacgaactactaagctcgctcaagatcacgcccggacaaatgggaaacatgaaagggttgatatacatcgaagggctgacggaaaaacaagtacgccaaaaattaagccattcaaaaatcatcagaacaaatagattcggggttaattcctgcctgtattatatcctctttgaggatgtaaaggggagatatttgtgcctgtttaatagtgacaaggaatgtttcagagcgttgttcttcaactatatattactaaattaataccctctaaaatagtcattccattttgaggatgaaaaaagcttgatatacaaattgttaattttctctaatagggggggtgaatttaaatttgtatttctacacgttttgaataatagaatatatacatatttttgatacataaatataaattttatcatggaaaaaacaaatataggatttaaagccgggatcatcttagaaaaattaggcgaaaccggacttataaccattgccgagcttgcgagaaggctaaattttgcggctgatgaaaccgcactcgccgccgggtggctcgcacgtgagaataagatatacatcgaacggcgaaacggtttgctgtatatcaggaaagagtgatacaacgtatcaaaaggataaacgataaacgctggaatgtttgcagtgcgtaacactattgatgtaaaagtgcttttcattatccatttgaaaccatttataaacttataaaaaatacaggtatggataagcacatcatcagagagaacgcagggaaactctggcgcttattaagcacagacgtacaccggaaatggaatttgcaggaagtaaaggaattgacagggttcaatgatctggaagctgccagtgcgataggctggctcgctcgtgaggacaagattcaattcgagcttgaacaccacgacactaaggataagaacgcattactataccttatgttgaacgtctatttctaaacacctccctttgaattgtaaaagcctccggcggggttttcgccggggggggcttcttgcatttgcatatataacctcaaaggcaagtcaaatcggacggggtggcggtcggacggctgaaaagtcgaaaacgtaacacaggcgtgttactacttgtctttgacaaggcattttttaggggtgctggcatacaatccgaaaggggcgggaacggctgttcccgtttgttctccctgcaacctacaggatattaaccttaaatcttgagttcaagttataaatgcaacttttaaagaaaaggattaatagctgcataagtaatatttttttcagagagaaaagagagacaattccctctgttctctgctgaatggataaatgttactatctttgtttttattgtccgtccaaagaaataaaagttgtagatgagtaaacatataaccgaaaagcaaaggtatgcaatttctaagatgttgcaagttccgatgagtaaaaaagatatagctgaagctattggagttgataggagtaatatttatagagaaataaaacgcaattgcgatagtcgtagtggaaaatacaaccctgatcttgcccaaagaaaggcagataaacgtaaggttgaaaagaagcgaaaggaggtatttacacaagctatgaagaagcgtgtaaaaaagcttctacgaaaggacttgagcccagagcagatagtgggcagaagccaagtagaaaatatagctatggtatctcacgaaactatatattgttggatatggcaagataaacgacaaggtggggatcttcataaatctcttagaaggcaaggacgcaaatattcaaagcgtggttctaaaaacgcaggtagaggatttattccgaatagagtggagattgatcagcgaccttcaattgtagagcaaaaagaaagatttggtgatttagagatagatacaattattggaaagaatcacaaaggtgctattctaaccattaatgatagagcaacaagcagagtatggatacgtaagctatcagggaaagaagccatccctgtagcaaagattacagtatgggcattacgaaaagtaaaaaacttaatacacacaataacggctgataatggaaaagaatttgcaaaacacgaggatatagcacaaaaattagatattaatttctatttttgtaagccataccactcttgggagcgtggtgccaatgaaaatactaacggtcttatcaggcagtatatcccaaagggtacggactttagtgaagtaaccaacaagcgtattaaatggattgaaaacaatctaaataatagacctcgtaaaagacttggatacctcacaccaaacgaaaaatttaaacaaattattaatatgaattccgttgcatttggaacttgaattcagcaagaaataagtaatgataaaaaataaactgcccgtaagatacacgggacagcattttactatagataaagtgctgatagatgatgcaattaaaattgcgaaaataaatgaatccgacactgttatagatattggtgccggaaaaggatttttgactgttcatttagttcgtcaatgcacaaatctaattgcaatagagaatgataaatcgctattgtccattctaaaaaacaagttttctaacaacacgaatgtcaaaattattgattgtgattttagatgttacaccataccaaaaagaaattttaaagttgtgtctaatatccctttcagaataacttctgaaattttaaaatccttgatgtttgatagtgttgagcattttatgggtggttcattgataatgcaacttgaacctgtccaaaagttattttcaaaaaaagttttcaatccatatattgtgttttatcatactttttttgatttaaaacttatgtatgaaatatctcatgagagttttttgccaccaccaaaagtcaagtcagcacttttaaagattgaaagaaaaaaaatgtcaataagttatgaattgaaaagaaaatatctgaattttctcactttcttgttgcaaaaacccgatttgccagccagaactgtattaaagacaatattcagaaaaagtcaagtcagagttattgctgataaatatggaataaatcttaattgtcaaattgttagtttggctgcaaaacaatgggaatgttgttttttggaaatgttggagagagttcctgaaaaaaaccatccctcttaattgttagttgattagagtctgattcagtaaaacaaaattattttttttactgaatcaagattaactgtttaatacaccattttagtcattaagtaacttctattttacttccatgtaatatccacaggattgcgtctcggaatagaagttattttataacttgaatatccaaatagcattggacaagccgctttacgttcttctggtattgataacaaatcctttaatggtttataattgtctatagccaactttacgaatccagcccaacatgtaccgataccaaaagcgggcgcagcaatatcaaaatgagtcaaagcaataattgcttcggtagggtcatcaattggctcaataggaacatgtgcaaaaagtaaatggggagcattatggcaaatcaaatccaaaccactatcccaagttgaaattattgcaggtacataatctgctagaggatgtgatgtgttttgaatagttcgcatccaatcaacggttaaacttgcaacacgatttacctctgatggtttatgaataacaatccattttactggttgtccattccctccagatggagcataacgggctatatcaataactttagcaattaactctttattaactgtctttgaagaataatgtctcacagaacgtcgactttttatatacaatgctatattctgtggttcaatctgactatccaaaaaagacgtattaattttttcgtcaagaaggaaatctaaggtaagagccttctgtgcacaaaaagactcacaatgaccacattttaaacaataatccaatttttcttcaggtatggttggataatttaaggctgtcgatttatcaatgattcccattacacatacagttgcgcaagtattgcatttagaacatgtttttctgtctataagaatttgtggcatttttgtctcctttaaattttattcattaagtgataaacactatatttaataaccccttttagccaacaaattgttatctttgcgtagggtaaacaaaaaataagcttatgaaaactgctatggaaaaaaaagaaaccggcttaatgagacagatcggttatctctcttttgtcgttgttttgttgtatgggcttacgctatttgcggtttcttgtgacaatgatgaagatcctcctcttcctcccgcagtggaaaaagtagtgctggcatttggtgtggatcagggtgaaggtcagctttcggctaaaccgaagttggaaaatacggctgcggaaaagataggagaattgatctctccggctgaaatagcgaaaggcacaacggtgcattttcgtgctacccattccaaatcatggacaatcatgtattggaaagtcaatggcgtcattattcgttctgtggagccggagcagactttcgtcatcgatgagcataaggaggttcgggttgctttcaagccttacaagtcaccggaaccggaggggctgtaaaacaaactgtgtcagcaaagcaataaaatattaattttgctgacacagtttaattgaattctcttttttgctgttcatttgctttatttcaggacttcgcccttctcgttgaagaacacttcgctgtccgtgccttctgcatcggtaaatgtcaccttgtaggtctttgtgccttcctcgctttcctcaactgcggcttccttgattgtcaggtctgcgaaatccttcttgatcgtgtcctgaaccgcctgcggcagatcctttacctcgattggcttataatcgttcaccattaccacaatctcaacatccgataccatgttgccggcgaatgccactgaactacccaatcccataacaagtgctactgcaaataatacctttttcataatccaatctatttaaatatttaacatatggtttctgaaagacaaagaacaaacattgtgccaaacaaacaaacaagtcatatatacctgataatcaaaagcatacaaaaaacacatatatttattgaagaactgttatctgtgtatcatttccacattttgtggaaacgatacacagactttctataattgcctccggcggggttttctctgggggcttctgacctttgcacatataaaaagcaaaatgatagtgatatctgtctaaaaaatcaaaaatcaatcttccggattgtacaaaatgatattgccacagttgagcataaggacagatccagctataaaatggagtaggagagtagcaaaatgatatttatgttttaggcgttcccttcggtcaggctttccgcttctacatggtaaacgcttcaatccttaacgcataatgcccacccacccgaataaggtaggctattttccgattgatcggttcggtgagccatccggtaaaccgaatgactttcaccgatccgaacagtcggaaaaggagtacccggaataaacctttccggctgataggtgcaagcacttaccagctggaaagatatattcctgcatgggtactctggtagccggttgtttgatcccgttattatactttcggaaaaaatctgtgtttagatacttttttctgtgtttaatcctagttctttgctatcgctttgggctagtttgatgttgcttaatccgggagcatcagagggcagaccgaagatcttctggactgctatcatcgttggagccggtgcggatcctttcaggttgtttatcgcttccggagaagggatatatccttcatcctttaggaaagagatctgtgcaaagtcatttttttttatggcaagaaaaaagtctttttcttttagatattgatctaccatttcttttaaatcatcttttactaatgaccagtagttacccttgaagcaatctattccttcaggtgattcttttacagaatctattttttgaaacccatttaatataccttcctctgtaacactccattcgttcctttttattccccagtcgatcatatctttgaatgaatatttttcatttagttcgtggatatcccaaaagtctttttgtcttggttcttcttctgtaatggcagatagtttcatggctgctatttcccgtatgtctgctattcgtatgtggtcgatttcttgtatggggaaaataaatttttcagtatagaaaaaatcgactttaattttgtctataggggagtcccccatgtatagtgtatatcctaaagctgatgtgtccagagaatctgtattctcggaatatggaaaactcctttgaataaactctttcatttcttttgtattcatggttccataatctatatcagtgaataaatctatgtcaatagatcttcgatgtcctagttgtaggctcaaacaggttccacctataagcgtgaaatctttaaaaataggactattgaccagcttttgcagagtttcttttaataaaggagaaacagtttcataatgtaagttcatagaatgtatttttgatagttatcgtttcttgtgttactattccatttgttttttatgttgggaatgacttgttttatggtttctattccatagaaccgaataatctccttgatctcgatatcgttgccatattcaaaagcccgttgtataacccattccttgttccttatccaatttatcttatctattcgtgtgtcccaaaataatcctttacttagtttagataagtcaggatgtttctttcgctcttctttcattatgaaggtatatatgtcatggttggcttgtattttaaagaaaaagccttcaatgtttatgtttaacgctttttctattgaaatggaggcttttatagtgaattttcgttccccttttatatagtcacaaatacgttgcggatattcatttgacatatgcgctaactttttttgagatatattcctttttttaaggattacatccaatatcttacctgccggaacatcttccattgacaagtatttttcatattttatattcataggactataattttgttttggcaaaaataatgactcttaatacaataaccaaatttggttattgttattttggaaaaattataatgcctgctcaatatttttcccgattgtttgcctatcattttgggctagctttatgtcgcttagtccgggagtatcagagagcagaccgaagatcttctggactgctatcatcgttggagccggtgcggatcctttcagttcgtctattattttaggggaagggatatacccttcatccttcagcccggcgatccgggtaaaatcgtttttttttatggcatcttggaactcacattccttgccttttgatatggatgcttgtagatcatcgttccaatcactgtttaccgataactccacgttaggcagttgaagaactttatccttcagttcttcaactggcagaccttcaatattgggtaactcttgaccttttaagaatgtatctagcttcagcgcatatttatagccgttgctatcattgtcaaatatataagtaacctgatcggttatattattaatattttgctttgacaggagcagctttataacgcccatttgtccctgtgtgatgttcccttcagtgctgatatataagatgttcttttcggtattcagaagcttcatttgataatgggacgcagcatcgatcatgctttcactgatatatatatgctctattggtcttgtcttgtcatgcttagacactacgatactatcgtatttgttgcctgatatgcctttgaagctcttgccgtcttcaggtcttatccccctttgggaaataccctgaaagccgttttggttaataagtctggtacaggtattattatagacttttccatctttccggtgttccctagaggtgaataccccggaaaataccggtgaagatagtgtatcttgagtaattcctctcttttgcaagaaatccccttgatagggtttcagttggctgttcaggaacgccagctgattaggatctagttttgcgttgctaactccaaaccggctatcttgagataatacgacttctttattgtttacatagttctgaacggcttccccggcttctcgcaggctaggcattctcccggtctggtcgtagatatgcttctgcattagatctatgatagtctttcctcgtgcttctccgtgaacgtcccaataggtatagtaatccttactattcttcttgataataacggtatcggatccgttgctcatcttaggggacgagttggaagatccggaaacaaacttccagcctaaatagagaaaaaactccggaagggaaacatcccttttcagtttgtcaaagtctactttcataacgtcagatttttaggttattacttttatctttacctagccctacattatcgctttgggctagtttgatgttgcttaatccgggagcgtcagaggacagaccgaagatcttctggactgctatcattgttggagccggtgcggattttttcagctcgtctattattttaggggaagggatatacccttcatccttcagcccagcgatccgggtaaaatcgtttttttttattgaatctgaaaaaatagaatcggttatttgttgctgtgttcttatgatgataggatgatcttgtatgttattcaggatctccttatcagaaaacaaaagatccggcttatatttcccagcgtagaagtttgacaggtacagttcctctgaaggctctaatttcattagcgaagatacgaaatcagccaccttatcgttgatctcctgcatgggatattttccgctgttggtatgcatcatcggaagtagctgctgccttatctccgtaaaggtcacattctctatgctttgttttggatcagcctttaacatttccttattctccggattgccaagagaagagtaaaaaacaatggatttccttaaaagatccctttcttctttgctcgtcaatatatcagaggatgcaagggagaagaggtcatatatatctctaggcttacatctttcatagaacgcctttatctttcctgcaaacaattcgataggattgacgtagtttactacaaatgaagtcttgttctctctgatgaagggaaactcaatagatttaacttccggtttgaatatatgggatcgattatgatagtttatatctagttttatcttatctccgcttcctgtcaccgtattatagtgcaaagagagagaatctagggtaaaattacttctttcggtcttcctatacccgttctgctggaaatagctatctaaagccttgttgatttgttctctctccgctaacatatcctctttagatacgtttttagagaaatcaagatccagatcgacagaaagccggggaagatcgaaaacaagcaggtttatagccgttccccccttcagtaacaatttaccgctaaactccggctgattgttaaggtcattgaggatattggataatcgcataactttctctattccagcaaccgtaaaattattttcttttgctagtctagtgatttcttcttgtgtataatcaaaactcataatatactcctttctctatttctttcattacatctttaggcgcacatacattccattccttgaaataggtatcacaacgggaaggatttgtaaggtaacttgttgtattacccatcttctttttacatacatcgaagaacatatccgataggtttagttgttcctgaagctgggacaggatgaatcctgtacgttgatacaggcttttcttttggtatagcttcaggcattctaacatatcttcttctattacggaatccggatcaacctcgattaaggcaaataacagttcttcaatgccaccggctaagcctatattgtttaagcagtcaattatggtttggctgattgatgtaaccgtgataggatagccggtatctttttttgtaaccaatggtttgtatataaactgcaaaggcttatatacataacgctggttcaggtactcaaaagaccggaagggagtagaactgtgcacataaagccagttaaattcctgtgtctgtaacatatagaactctaatgcagaatgataagctaggcaaccgttatcaacggaattgcaagctatctgatacttgttctgtatgttagccggcaaatatactccccggcgaatatgtgataacaaacctcgctttttccagttgtaaagacgggatttcatggtgttatatcctactggttgatctatgcttatcatgcctgtttctttatatttagatattatattactcattttacttagaatttatttcaaagatatcaaatttgatagtattgagcaaatttctaagtatattttttatatttaaacttgatattatcagttagtagacagataattaagaatatactttcggaaaaatattctcttatctttttctgccctgtatgttaatcccttctatccttagatacttgtatagggtagctctggaaactcctactatccggcaaacatcatctatcgtgcctatttcattttgtagatacttggtgtattctatagccgctagtttagctttccttttagcttgatctgttagaccgggcttgcgtcctcctattcgtccttttgcctttgctgaagtcaaaccggctattgtacgctcggaaattatatttcgctccatttctgcaatacagcataaaagatgaaacgcaaactttccgattggtgttgatgtatttaattgctctgttagactaattagagcaatgtttttcttttcaagagcttcttgaagttttataagttcgcaggttcttcttcctaatcggtctagtttccacacgataagctgatctcctgtttttaattttgcaattaaagcatctaaaacaggcttatttttattctttccagatattttttcttcacagatgtgatccactccgtataaacgtaatgcgtccagttggagatttaagcattgatccggagttgatacacgtgcataaccatatttcataatttttacggcaaaagtagcacgtacatagcctttgaaaaatatagagaaggtgatttttgaatttattaaaacgaacctttttttaaactgaatatgagattattaaaattaactttattactagtgttatgtgcatgtacacatagtgtttatgcacaacggcattatgtaggtatttcagccctagaagtaaactatggattgaatatttttggtaggaataatactaacttaaacctttcagtatcaaagtataggagtcgaacaacttactggaaaataggtttgaactattttgaaaagtcttataactacagttatgaaagcaatactgcggaagttccaacgatagtttcttttagctctacagcaaaagattactatattgatgctgcttatttcaaaacagttgcgacaaatctttcttcactttattttagcctaggtctaggtctttttacaggtgtagaagcgtacaagaggcaggataataagtatgatttcttacttggtttaaagatcgagcctgaattagaatactttgtatctccacgagttgcgatacttggacgtgttaagcagtattggagtccgtttagctatgcaagcaaatggaatacagtctggaatcttggtgttaaagtccttatttattgattatgatattattatcagctgatgtaagcgcattgattgacttattcaaacaatgtggcgaaatgctagccggtgtcggatttgtctgtgcaggtcttgcggttataaaaaaaataataactaatcatgagaaaatgaaagaagctataattacgtatatcgttgcattagtaatatttatactaatatggtcgcttatataaatatacaaatgactgaatatctagccactaattattcattatttgatctggcgatagttacgatagttattgtttcaattctaattttaggattggtctatttttccggaagtaaaaagaaaacggagtgtacagcttcactatcagttgaagaagaaaaatctgattctgatctagttttatctccacgcataacaatagtttttcaaaaggatctttcagatgatgaagaattaagtagagagatagcggatatgtatatttcaaaccgggcgtactattatgctggtaagataccaccattccagcatcaagtactttcggaaaaatcagatgatgtttttgtcaaatatgaaagtgttgatttttccgctttaagcaagattgatatataaataacatgtataaaataacaattaaaattttaagattatggtacaagttttgaaaaagagtgtagattttgttagtgtacacaagcgtattattatgattttagggcttttcctgctgacttttgttgttgttcctcaagttgtagaagcccaaagcgcattaaaaattagcagtttgtccgatgttgaatcgaaagcgcaagaaggttctgatacgattcttaatatcgcaaagtatgtattagctgccgtgcttggcatagctttagtatttgtgatctattcccttgcaacgaataatccccacgccaaggagtatctgctcggctggatcattgcggttgcggttattatggtagctttccttattatctgattaatgaggactataagaaagataaatagaccaattaagttctttggcttaacgtcgggacaatttggtctatttatgttggcaaatgctttgattataattgtttgcatatttaagcatgtgcatccggtaatcatagttagtgtcatgggagctatattctttgcttcaggtatcttattcaagaacctaaaacgggaacataaagctggcaatccggattatctaactggcttatcggttagatctgcaacccctaaacagataatagataaacataaggtattcaattttataatgaagcagaaatgatcttgaaatcctgcggaatacgtgatacagattaaggctgtcgctttttcttgcagagagtttatatctactatgtggtaactaattacaaaataaaatgataggatttattattatatcggcattattactgtgtggtgtcattacattactcgccatactttttatgcgtccttctgaagttcctatatctgataaatcaatagatctttcggctgtactaccgatccagaccataacggatagcgttatagtaaacggtagcggagatttaaccattggatacagattgtttcttccggaagtatttactctttcgcaggaagatgcaaaatatatacatgagaggttagaggggctttttaagatgttacctcctgcaacggtggtgcatcagcagtgcttttactatgtaagccagtataagaacaatgacttttctgttaatccattgaaagcggaaagtattaaacactttaataacaagcaaataataaactgctatacaaatttgtatatcacttttgccaatacagatttgaaaaagggagtgcgaaaaaaggcttctaatacatcgctgcttaaaaaactcaattatccttttaaacagccctacaagaactatgaagaaaggttatcagagattgaaccgaaaatcttgaattttgaaaatgggttatcttctataactcaatttgagataaagaagatggatagtaaagacttaaataatgctgtctttgattatcttaatctctcgtatgctaaaccaacaaaagacgctactcaagaaacagttagcccaattatggtaactcctagcggtgatctgaaggttggacaagaatatttagcgatgctttctcttaccgtggaaggggaaaatctttatgagctgaatgtacccaatacgggtaaatcaaaagcgtatggaagtacgattgagcttccggagaatatacagtctaaatgttctatgttgtacccggttggactaggtttgcctttcgatcacattgtaaatgttgtgatagaaataacagatacagatactacgctaacggctattaatgctgaaaaaaacgggctaaactatttgactaacttttatcctccggctaaagacaagcaaaaacagcaagaacttttctgtaaagaaattacggattttgattatcaaacagcttatacagcttttaatgtgattatcaatgatccggatcgttcttctctaattcggaaaatttcattggcacagcagggatttagttttatgaaccaaagttcttgttatgtcgagaatgcggagttgtgcaatttatttttttctaatataccggggaatgctcggagcaattataggggatttatcaatacgaccaaacaggcgatttgttatttgcaaaaagatagtatttatatttctgatctgcaagggcatttgtataatgaccgattcggaaatcctgcattgataaatttatggaataacaaggctttaaacaatagaaataaaatagtaatcggtccgtccggctccggaaagtctttttggctaaacaactatatttatcagtcttattctttgggtaatgatattacaattattgacatcggtggatcttacaggtctatgattagcctgcaccgaggtaaatattttgattctacaaatcagaaacagtttgcttttaacccgttcttgtgtgaacgtgatcggaatggtagatatatttatattgatacttcagatgcagaagcagccgaggatcttattaaaacgatctgtgctcttttatcctatatctggaaacaaaataagcctatcgatcccaccgagaaagctattcttagaaaatcagtgatcgcattttatgagtatgtaaataattcttctgttgatggaacaaatgaaaggatttttcctaatctgatagaataccggaatttcttgcgagatgtatttatttacaaaatgactgactttgaaaaacgtagatttgagatagaggaagtgcttttactactagaaccttacacggatggagaactatcctttttgttgaacgcaactgaaaatattgatatagttaacgatgatttaattgcgtttgatatggaagacgcagcaaagaaggagtattttcctttggtagcgattatcacgcttcaaatggttatcgataagatcaagaagcgtgaaggagttaataaggaattgattatcgatgaagccctagactttttaagtgatgataagtttggtgattttatcgcctatttgtatcgtacattccgtaaaaaagacggggctataacgatagctgcccaaaatgtactgttcctgaagaactgtccaccggcgatcaaggattcaatacttataaactgtgatactaaagtaatactggatcattcaagttatagaaaggagttgcccaatctgcgagatattctttctatttcagaagaagaactagtaatgatagatagtctgcaaaatagggatgatgagatcaagtggagagagttcttcattaaattgggaaacgaaacctatgtttttcgcaatgaagtatctgaatttgccgctgtcgcttttgattcaagacaatcgactgtggttaggctcaaacagctttttgaggaaacaggatctacttatgctgctattaaccggtatttagaagaaaggagaaaaaaatatgaatgatgctgtagaaggattgaaccagataaaaggatggtcgggagaatttaacaatacgtcttttagtgtggcagggtatatcaccgctgcaatgttaggcgtttctctgatttttgtagtctgggctttagctacaaagaaagataatgcaagaacatatctagtcgcttggtttgtggctttgatatttgcgatagtgtttattctgcgataataaatttataatattatgaaaataaagatactcttatttttttctgtgttgctgttaagtagctctttttctgttcaaaaggctagtgcgcaatgggttgttaatgatccggctcacatgggaatgaaccttggcgaatggggagcgaatgcagcgcaatgggttaagcagcttaatgaaatgattgatgctgcacatatacgagaaaatttacaaaagatagaccaactacgccaactacaatctttagtagaacttgctgaactgttggatgatgtagcttgtctaagtagtgattaccgtttttatatgaatataggcggtagctatcattgtttaaagtttttaaacttccaacaagttacggtaaaccttaatttgagcacagatctattatttaaggttgctactgtttccgactatttcagcatgaatagtgagggaagaatgtcctttgtcggacaggtaagagaagccttagaaacggcttctgctgaaatgaaatcttttaatgaaatagtaagaagtgagatcataaaagatgcaagtcgaaaacatgtagggaaaacatattatagcggaaatttatctgcttttagtcgatatactaattaattagccttatgaacggacaagatacttttttatggggattgcagattaatgattcccttacaacagaattaactgcgcaaatgacggtaattgcgcttggtgtagcagttatttgtttcatctgtaatatagcttataattacctatatcatggtgttagtcagcttttaacatcggatgaaaataagtttccggatttgatggaaatagctcgctgttttgctttaatattctgtctttcgctatatacacctatcgcaaaaactgttgttggaacccttgaagtaataaatgaagcaacatctttaagttcagtccgggcacaggagtttgcggcttttctagacagatcagcggaagaacagcacaccatgatagccgataatgaaaaaacggcacttgaagcggaagtcgctgcgggggaagatccggaaggtgctatgaataaagaactacaaaatatagatcaaggtaataaaatagatgaaagtgcatctacattgaaacaaatctcccaaatattaaatcctgccaatttcgcagcaatgctcttacatgctctagccgcactgctggtcgggattgtacaaattatcatattgggtttgggcgttgtcattgtaaagatccttgtcatattaggtcccttcgtttttgctttttccattctaccggtattccaaaagcagctgtctaattggtttggtacactgtgttccgttggtatggtatttactgtgattaatattttaaatcagataatgtggtttacatttaagtcaatttatgattctgacgcattcaacgcagtagatgaagcgacaaaacagctacaatatttaggcatggatcttgctttgatcggttcttattgttgttgtttctggttggcaagtaagatagtcggtcatggtgatgccggtagaatcatttctaaaacggtatctattgtaactgctgctgcaacgatggcgattgcaggatcagcgatagcagggggggctacaaatgtaggggctgctgcttcattaggtaaaagtgttatagataacgaagaataaataaatatgaatcttacaaaatttaaaacagtggatcaggcttttaaaacaactgtgattgttgcatcttcttgttgtctgattatgggtattgcatttactgtctgtttcttctatttgtcaaacaagatagatgcggcttatacgaaggctttagtacttgatacttcaggacaggtttacgatgttgcagccattgaatccgcagcgatgcgaaagtatgaatatgaaaatcatatcaaaacatttgtttcgctgtggtactccttcgatgaaagcacttatgagaataacgtaacattagctcttaatttgattggtaatcgaggaaaagagctttacaacgaatataacgatattaatatgcttaattctttgattcagaaaaatatacgctatggcgttataatcaaggatatacatatcaatatgcaaacagttccgatatccggggatatactgtttacgcaaaccggctatcgtgctagggggagcgtagcacgtgatatttctgtgaactttactctatatgatgtatctcgatcacgtgaaaactctcacggtgttaaaatcgaaagctgggacgttcgatattcggaaccacgagaaataacagatgaagaaaaattaaaataatggagctatgggaaactttttaagagaagcgttgaaggacaaaaacaaattgttaatgttagtacctctgcttttgggcgtactgtttgtaatagttttctttggtaaaaaagaaaaaccggctgaatcagcatccaatacagaagaagtgaatcaggcttttcttgaaccggacacagaaggagaaaagaagatcgctaataaggtagatgcttataaacgtgaacaagaagaagctgctcgtaagaaacgtgaattggaaaaatcacaagtaaaaggaagcgatttctattttgaaatgcagacatccgaagacgaatacaacgagaaaatgaaagctcgtattgaaaaaatgaagaaagatccattggacgaagttactagcgaatacaaggagcgaggaaaaaaatctaacagtgcattttctgataaaatgcgccaacaactaaatgatattgaggatcaagaaacctttaatcagatagtcaaggaagcaaagaaagaggaaagaatacgcaaagagctagaagaaaatgcaagattccgggatgaaatgagaaagaaatatcaggatcaagcatcaggaaaagatatagagaaatctcaagagaatatttttccgaaagtaaatgattctgttcctaaagttgagaaagcttcaaagccgacttttatagtggaaaatggaaaacggcgtcgccggtcacagtttactattgaccaaaaagtcaatcttatcaaagctgctatttatggagatcagaccattgttagtggaagtgctgtccggatgcgcttgttagagcctttatgggttggtggcgttgagatccctgcaaatacgatcttctacggaaatgctagtgtcggctctactcgtttgaaaattacggtagagaacatacgatatgggaaatatataagtcctgtcgcttttactatttatgattctgatgcgattgagggattgaatttacccaataacatgaaagctgaagctgctcgaaaaatggaacagggcttgcttcaaggcgtgcagcttccgatttcttctattggcacagtaacaagtgaggtaactagtgcgatcacagccactacacaggttactagacaaattttaaatcaaagcctttctcaagtaaaggttcatttaaaagctaactataatatgtatatcaaggaagaaactaatgaagacagaaaaaagagagaggaagaagaagctgaaatagaacgtctgtatagagaaatgcagatgcagcagaatgaaccaaagaaaaagaatcctttaacccaactaattgaagcattataatgataattgatatacttaattttatggtagctgtagctactgtatttttggcttataggttctttatagaacgctctaaagggaaaaagatagcagaaatgaaagtactgatgtatagtttaatatcttgtttcgttctgctttggattataaatatttttattggttttgtaaaatgaaaacattgctttttatattaatcatgttttgtgttccattctccatttctgcacaggaaaaaaaagaactggactcccaaacaatttatgtttcgtttgataaaacgaaacatatagtacttcctgcacaagtaagtgacatttcgtatggtcgtgaagattatgtaaaagtggaacgggtggataatgttcctaatgttgtccgcataacggcacaggaagaagatttttcaggaacgacaaaccttatcatagtttgtacaaacgggaatgtctattcttataaaatatcctatctgttaccgggaatgacggatcactgcggaaatatcgtatatgccggtgatgtggatagatcacgttgttataacgtaatagtcaataataacaatactacagaaatgttttttccagcagatgtgttatatctgaaacaaggaaatgaagaagttttcggggttgagtattataataatatggttaaagttggtacaacttttgatgcctttgaaccttctaatctgtttgttatcgataaagatctgaatacctatgaaattaccttgtttaaagaccatgctcttacttactcttacaactttgacgatggtcgcaaatatattgcacacattgatgtaaatagcatagagatggataatcttatcaataaactgcactataaaaagcgtaatatcttcagcttgggagttataaaaaataagtttgagatgtcccttgcaaacctatatgtaaaagatgatttcatgttttttgtatttgatataaaaaacttctcaaatatagattatgacgttgattttattaaatgcttccttcgtgatcagaagaaggttaagaactctatccagcaggaagttccgtatgatccggtagaacaaaaagactttgataaaaagatattgggcaaaagccaaaatcgctttgtcctagcattcaataagttcactatcccggatgataaggtttttgagatcgaaatgtttgaaagaggtgggggaaggcatatgaaattatctatattgaatgaatatatattgtccgctgaattattaaaataattgtcatgaagctacaagaggttctaacagaatatcaatataataatgtcgggcaatttagggcgattgcggaaagtttaggttacaaagaagcctataacaagggttctttgctttttacccggaatgacgaagtatttcgtatcgatatggataagatacgttcacacacaaagcgagaaccggatttatctgcggaaaaggcttctatggatcgtgtttgccagttctttaatcgggatcaggctttatctcccgactataaaagcgtattaaaaaatgaaggggttgatattgttaactggggtgatctaaaaaatgatgccaaagatcgttttactgtgatcgatcataaaaataaaatctgttataccggaaaagaactatatgagtatgctttgcaaaatggttactcgttagacgggaaaggcacaaagttagagaagggtgtattatccggattaatggatatcaatggtaaaccagctaaagttcggttgcatgaacacggtacttctattatatataggaaggaagcgttaaccataccggatcgcatttacggaaagaaattatcgaagcaacagaagcaagatctacttgatggcaatgtgatagtcttgtcaacaaaaaaaggagatatacttcttcaggtcgataaggatctcaacgctgtggtggtacgttcggaaaaagaattgtctgttcctgctaaaattggagattacgaattgaccgcagcagataagtatcttttagcgaatggtcattctttagataacaaaatgatccacactcctgaaggttacataattacagatatagctatgcttccggataagaaaggatatgctttctcaaacatccagaaaatatcggaaacaaaggcacagcagattttacaggcaagagaaatggcaaaggataaagagtatcttaatgataagctaaaggatatgcagcgtaccggaaaaatcgatatagacgagttgaaggataaaaggtatgagcaattaataaacagccattttgccacagaacataaggaatacctatcttatctgaaagatgaaaatccggataaaaactataattatgatcttgaagcacgcattaggttaaaggctggggatatgttagaaaaagaaggaataatcgccaaaggtacaactgaaaaggaattgaaagaagaaggctttaaagtcgagaagatccgggaacaatatcaggagaaagtaacgggtaaggatcctgttcctgatcgagatcttgacaaggagttaagagaagccgttgtcaagaatgactatgaaaaaatagctagtttgaaagaggaaggttacaagccttcagaggaagttattagaggtttgggacaagatacaaagattgatcagacgcaagctatcgttatagaaaaactatttgggatgaaacctgaagtgcaaaaagcggaagaagtaacacaagcaaaggaagaatccaaagaagcaaaggtagagcttaatgctgatcctgctagtgctaaggtttctccggaactagataaagaatttaaagaagcagtagagaaaggcgattttgtaaagatgtcacaactgaaggaacaaggctatcaaccttccaaagagttgattcagtctttgaatgaaactgcatctggcaatacgatgatagccgttcagaagatatttaatctgaaaggctctgctaatacgctcggagatgttaagctagcacaaggtcaacaaagtgcagaaaaagatctaaagcgtcctctcgccaatacggtaaataaaatgtttgccgatttataattaatagatttttccgaaagtaaaaatgttatcacttaaaaataaatatcatggaagattacaacaaattggtagaaaagaatcagactggagagattgacgatcttgaatttttattagctcaagaagatttagcggctctctacgttgcggatatgcaagctgaaggagttagcccgaatgcggaaaacgctgctgaatggttgctaaaatatgaaaatgaacacctttatcaataagtcatggatggtcaggcaaatgataaggctctgcaaaaatttgcggatcttatggttaagaaacttacggaagtcgatgcggattggcataaaccttggtttacaacaacaggatatggattaccacaaaatattgatgggcgtgtttataatggaatcaattccttcatgctttttcttcttcaagaggaacgtagtttccagacacctgtatatatgacttttccgcaagcaaagaaacaagggcttcacataaacaaaggagcatcggcttttcctgtcctattttggaattttatgattaaagacgataaggggaataaaatttcgatggatgattataaggctttgactaaggaagagcagaaagaatataccgttattccttatactaaaccttatcacgtgttcaatgttgatcaaacaaactttgcggaagtatatccggaacaatggaaggcattgaaggataaatttagttgtcctaaattgaaagatgagcagggaatgttttcatcgccagagttggatcacatgataaaacacggtacatggttatgtcctattatttcttctttctctgacaaggctttttttcgtccttcagaggacaagatatatttaccccttaaaggtcaattctatacaggagaaggattttatagcacattgttacatgagatggcacattcaaccggtatagatacccgtttaggacgtgaaatgaaaaacatgtttggtgatcccaaatatgcaaaagaagaattaatcgcagaatttaccgctgctgtttcttgccgttctctaggtatcgtttccggagtccgggaagaaaacgcacagtatttaaaaaactggctcggagcgatcaaaaaagaacctaaattcctctattccgtattagttgatgtaggtaaggctagcactatgattttgaatgaagtctgcaagtatgagttattgaagaaggaagaacaggaaaagcaacaggaagaatgcaagcatatagagaataaaaaagtagatgatagcaaggatttttctgaaacccggaatgatgaaaaattatcaccagcttttaatatagctctagctgctgcgctagccggttcgtttaaggaattggttaacctaaaggagcagggatataaactgtctgcaaaggaacttgatgcgttaaaggatgcagatccgaaaatatatattgccgcacagaatatatttaatataaagttggatgatcctactccttccctacaattttccgaatcaaaaaataaaaatgaagtcaaacaattatctttaaatttttagcgtatgtttataggtcatgttacgggttatcttggatcagatgccaagaaaacacagaaaggttattcattcaatgtttccactaaatataaagagggaaacgaagaaaaaacgttgtggatctgttgtttcttaaattacgaaacaaaggttgcggagtttttaaaaacaggaactatggttcatgtgtatggggaaatcactgtcggtatctttaagcgtgatactggtgatacagtcccttcagtaactatgagtgtagataaggttcaattactctctagcaagaataaagaataatggaaccagcaaagaaggaattatcatttgtctttatattgctttccgtaataatcgggggtgtgataatctttcagtgggttttggtgaatgatctttgttcaccaagcccagctgtattattgcagttgggaaagtttttacgcaaagctattatgtttcgattcctatatgtagtattattagctgggttggctttcctattccctgtacaaaagagaagagatgaatccttgaaatatgtatatactgccactacattaatcttagcaatagccctaatattaggcttcagtaatgttctatcatggtacaatttattagtttttccgatagtatttataggatttacaatactagttatccaaacagccggtttttaccttaaacggcatgtggtatctgataaatctatctttggtgtatcacatgaaaaatcagagttttattttgattttgaaacagtagaaggaaatcttagaatccataagccacagcaaaatctttatattgacggtggtccgggatctggaaaatcggaaagctggattaaaggcatcatctatcaatgtgcagagcgtaactatgccggatttgtatatgattgggaaggagatcctagtaaaccgggttcacctattttgtcccggatcgcatacggtagtatagaatattttaagagaaaaaatgtacctacaccagcctttgctttcataaattttgtagacatgtcccggacggttcgtgttaatgtactttcggaaaaatatgtccctaaaggaagcgaatccttgtttattcgtaatatcgctactaccttaatgaaaaaccttgaaagttcatggaaggaaaaaactgatttctgggcgaacaatgcgattaactatgtatattcaattgcttataaatgttacaaagaacgagcaaagggaataggaactttaccccatgtaatcgcttttgcattatcagatagtgatctggtctttaaatggctctctgaggatgcggaaattgcgctaaacatgtcttccatgttaaccgcatggcgtttaggcgcacagcagcagaccgctggtgcggtatcttccgcacagactccgcttgttttgcttaacaataaatacatcttttgggttctatcaccacttccggaagaagaatattcactagatataactaatccggatcatcctacactattgtgtataggcaatgctccttcaattaaagaagctgtatctcctcctgttagttgtatcgctagcgttgtcatgtcgcaaatgaataatcccggcaaacaaaagagcgtttttatggtggatgaatttccaacggtaaatttgcaaggtatagatgtatttataggtacagcacgtaaacacaatgtagctacaatcttagccgtacaggactttaatcaagcaatccgggattatggagagaaaagtgcaaatatcctgcgatcttcttgtggtagccaagcctatggaatgaccggtaacgaaaagacagcaaaggatctagaaaatcttttgggagaaacgaaagaagcacaggaatcgttctcacatcaagaatccggtactggaagcatgaccgaatctctgcaaaaggagaaagtagtaaaggctcgtgaagttgccggacaaagtgttggtcacttcatcggaaaggtcgctggcggaaaaccaccttattttaatacacaatttaatatgtgtaagtttatagataaggatattccggctttttccaaacctgtaaatttgggagatggcaaagaagaattagagtatgatataatggaagaaatagttagtcaacattatctttcaatcatttcaaaagtaaatgcgatcttggaagatgtaaagaataagacagaaacggacaataaaaataaggaaaaaaacatgccgaaagatcataatcataaggcatggaaggaataaaagaggtatttttgtgaaaatataaaaaaaataatatatgaaaagtaggatattgatagttttattatttgccttatcttcgtgtggatcaactgaatatgaaaaggcaatagcggattggcttcaaaccgatgaaaacggtacttggactgatcttaagtttgaattgatagagttgcttgacgaaaaagatgttacagtttccgacagcttattgtatttggatagtaaagctgctcaacaggtacagatgatagaaagagcggagaatcctcgtgctttggtaaaaccgcttttctctgattacaccaaggctaaagataatttaaaatggatagagaaaaagaaaatggagtataaggatagagatagtacggaggtgttagccaaactattgaaatgcaagtatgcaattgttccacctagtttaaaggctaggcaggagagagttggcgagtttttactcgctcccgatatgaaaacgtgctggggaaggatgaaagctacgactaaataagaaaaatatgaaggttcagttttttaaagattttagcaagttatcagaaacgagcgatttgtttattgtagaaacagatcaatttgggcttattgatggcaacggcaatagctatgattttgatagcagagaaaatttctagaaagaaaaatataagggtttgtttactttacatacacatggatctgaatttaaaatatataaagatgatgaaaaaaattaagctgcatttgtttgcgttatgtgctactctagtattagtttcttgtggtggatcggataatgatcctgtttttaataatacatctgctgtatataaggtagtattagaggcttcaggggatgattatacagctgaagctattattattaatccggataacgtatcaattatagatgaaacaagtaacacagacctaaaacaaagttctgtaacggagtattttagcggacggaaagtttatataacctctaaagaagtgaaggttatttctgctcaagggattattcttagcaaaagtaaatccggtgctatattgaaaatgacagtgtatcaggatggaaaagagatctatcaaaatacagtttccgttccggattcagagaataatacaaagtctatacaatatactaatataaagaactagattatggataaccaaacggctataacattgaagcccaaactaggttattgggtttcaaagtattttgtgataattgttgtcgcatctttactcccgttctctgctatttattgggatttagaaatgcctgtacactatgcgttaatggtgctgtttttagtcgtttggattatgttgtgttacacatatatagacacgctgtttgctacaaagtggattattactaaggatgaactgattttcaggcatggtataatctcaagacgagaggaacatttagaattatatagagtgattgattattcagaaaaacaaaatttcttgcaattagtatttggcaacaagacagtgaaagttatatcaggtgatgcttccgatcctattttatatatgtatgggattgatcggaatattcctattatagatactttgcgtgatagagtcaaaattgcaaggaaagaaagcggaatttttgaagtagcaaatagatcttgaaaaaggaaagaaaacttcagtttaaaaaaaggttcgttatattgaatgcaaaattcaaataaatatttaaaacagcaaaaattttgtggttaaatattgtaatttttatgttttctcccataattcaggctgaacacatttccaaccagcggcagctaaatagtcccggattcgttcttcaggaactttgccccctttttgaaaggtcgctttatcatatttcgcctgaataggtgaacgtagggaatttacataccactttctttgtttaataagctcgcggaaagaatcttccaaagtcagtttatccatttctttaatattaaaaaatgtatatatagttcaatgtatcaaaaaaatcgaatgttatataacttatatatgttatatatattgtatatgttatatatgttatatatctttgttgggcgattaattcatgcaaagatatagattattaatttaaaacataaatgattatgggaacaacaatctcaaacacccaaattgataagagaaagaaactgttggatctgccggaagacgttataactgtgctatccgtacaagcagctaaggaagggaaatcagctaaagcctttatggaaggcttattgatctccgctgctaatgatttagaagatataacaacttatacgtttctttccaagaatcaacctgaagggcatgtcatggttagtgaagccgaacaaaaagcctttgaacagaaatatggtttatcatgaatgtagaatattcaaagccatttttaaaggcagtagataaattatcagggaaagttctgtcttctgtccttgatatgatccgggaagtgaagaatgctaatggtattgatgaaattactaattgcaagaaactcattgcctataaatcagtatatcggattcgtataggagattatagagcattctttattttccacgttaagattgtagatgatacagttaaatttgaatatctagtatcaagaggggaagcatacgataaaaaagtacagtcagagttacggaaaaaggataaatgataatttattatggaaaaagaattaagccgggttccacgcctattaagtgaaagttacaattctgggctaattgagcgcttatatgattctggcggtagtgtaatgctagatattataatttacctttgtgggaatcatattagagatctatttggtgaatcatggttctcaatagaggatttttgtaataaaatgggttataatcggacaaatcttcaaagaaaactatctaaggaacagctgaaggatctttttggaaaacgctcacctcattatatctgtaaggatataaacggggaggaaataagccaccccatagaaaccgtttttgaagccgccctttataaacttggcttagaaaatatgtcttatcctgtttctacaagcgaaggcacttcatatatatttattcagatccttaccaaatttgaaatccggacaaattttaaaaccaagaaaggaacgaaaagattatatagtgctactctgaataatctgataaaggattctgtttatactctctataatctaattgaaagtcaggattatagagagttaccttccaaatatcgatatttctatttggaactatcgaaaatgatatatcttattaagtataaaatcaaaacaggagatgcacctagttacagattaaccgttgatcagttggctaagttgttcaacctcaattttgaagagaataaggaaaggaaaagaaatgtaacaaaagttttgaaggggataaatgaacacttgagatttaccaactttcaatttaagtacgttaaaggtgctaatgataaatgggcatatacggtagattttgaattttctcaagaaacgcttgattattttgatgaacgctataccgctatgtttactcaaagattctatagtgatctgttatggagatacgctggtttagcttttcctaattgtgcggtaggcagagatcgggttaacaaagttgaagatataaaatctgatcgaaacttgtatgaagattatttggcatgggctaattctccacaaaacaaagcactgaaagaggaagtatatagggaaaatttctttcgggtatttggaaaaacccctgaagagtttggattaactagtaatgccccgactgtgacacgtgagccaaaggaatttatagttaaaaatccacctactgtgacacctgaaccggaaaagattatctagctgtgtaaaacactacacttttcaattctattaacatttccagctgtgtaaaacactacacttttaggtttccagctgtgtagaatgctacacttttgggtttccagctgtgtaaaacactacacttttaggtttccagctgtgtagaatgctacacttttgaaaatttagctgtgtaaaacactacacttttcaatttagctgtgtaaaatactacaccatattaaagatatcgcaaaaaattaaagtgttgatttttagctaattaatgaaaagtgatttttcccagctgtgtaaaaggctacaccatatttcttaatataacctaaaaacctaacccccctataatcccccaaagggggacagaagaaatgaccggaaaaatgatatttttccttcagtttatatcatcatactttcggaaaaatactatcgggcatgacaaattgtcatattttgaggaaagtaataattctccaatctcatttaatcagaggtgagaaagagaaacaacagctattttacttttggtatacgttaagtaaaatgttttttttggcatgtatcaagaaaaaacacattttactttattgttttactaaattattttactacctttacaaaaagtaaaatgataaaagcataatagatatgactgatgatgatattaa

SEQ ID NO: 638 - DNA, 5595 bp, Parabacteroides merdae
  source 1..5595: mol_type = genomic DNA
gcaagttaaagtattataagaatattctaaaactggcatactcttatcggaaggtgtataaaaatagcgatttatatattctcttatcagaatcctttatctcggaattcgaaaagatatctagattaaagaatcttaaaaaaattagactgatatcaaatcctattacaatagccaatgaggattttatatataatttcgagcgaaaagaaaagcagataatttttgtaggaagattagagtatacacaaaaaagaatcgaaagaattttaaatgtctggggcaaaatacaatctgaatataaagactgggaattaaccatagtcggagatggtcctgacatactaagactaaaaaatattactgaaaataaaaatattcagtctgttaagtttgtaggttttcaaaacccaaaaagcttttatgagaaagcctcaattttgttactgacatcagattatgaaggtttcccacttacgataacagagagtatgaactttggtgttattcctattgtctatggtagttatagtgccgcatacgacattatatctgacaactattcaggtatgatatccaagccaaacaatggatttgacgaggaagactttacaaacaagttgaaaatgcttttgtcatcggtaactaagcggaaagatttttctctaaatgctctaaatgacagtaggagatttttactaaacaacatttacgaaaaatgggaaaagatcttgtgacagatgaaataactgttataatgccggcatataatgctgaaagattgcttcctgcaactttggatagcattttgttgcaaacttataaaaactggcatttaatagtagtgaatgacggctccacagataaaactgcggatatattagatgaatattcttccaaatataaaaacattgaatatattacaatcaaaaatacaggatcggcaaggattccaagattaaaagcagcaagtttgagtaatagcgaatggatctgcaacattgattcagatgacattattgaatcaacttatttggaaaaattagtaatacaggcaaagaagacaaattcagatatagtttctccaaccatgcattacacaccttttgaaggtgaagtctttaaccaagtaccagataaagggtttgacttcaatcaagttctgacaggaaaagatgctgcttttctaacctttaaacaaggttctggttctatgattgcatgcaatggaatgctttgcagaaaggaattgtatgatgaacttctaaaagatgtaacctcatcttcctatgtatatcaagatgaagtggattttttttttatattactcagagccaatcgtgttgcgttcagtgacgcaaaatatacatattttaaaaatgacaatagtgtaacccatactccccgagtcaaaacttatgataagttactgacggaaattaaatataaccaattaataaaaagagaatatactgacaattcaattattcgtttgggaaatgctcgttttcttcaaactctgtttgcaagaagaattaaatatttgaaagaaaaacatcaatttaataagactcaacaggaagaaataaatcagatgtttaggatggcttttcatcacatagacttaaatgcacgctatcctttgatgaaaaaaataatgttttcatttggtttccaattctttaaattaagtgtaggcataattcatggcatcaagcgttagttcaaaaaaacaaaaaagcgcattaatatggaatgcagttgaaagattttcaactcaagctattcatttaatattaagtataatcatagcacgtctattaaatccttcagattatggcttggttgctatggtgtcaatttttatggcaatagcgcaaactctgatagatagtggtttctcgaatgctcttatacaaaaacaaaatcgtacggaagttgacttctcaacaatattccattttaataattttgcatcattatttctctatattgttttatattttggttcaattccaatttcaaaattctacgattcttctgaactgataccggttcttagactatttgctttcaatcttataattcaaggattatctatcatacaacagacccaattgataatagaacttagatttaaagataaagctaaaatatcccttgttgcggttattatcagtggaatatgcggcataataatggcttataatgatttcggaccatatgcgttggtttggcagattataataatgaatgctattacaacgattgggctatggataatgaaaccatggaaaccgatgctggtattctccttaagttcatttagaacgttattcaaattcagttccaaaattatgataggaggattgttgcacagtgtatatactaacatttattctcttataatcggaaaaatatacaatagcgcagcattggggctttacacaaaggcaaataatttaagtaaaacaccttctttacaaattgcaaccattatcgatcaggtttcatatcctgtattatgcggattacaaaacgatagtgttcaacttaaaacaatgttttttaaatatttacgtctatcatcatttattataaccccaataatgattcttttatgctgcctggcaagacctttggttattatactgttaggtactaaatgggaagcaatgataatttttctacaagttctaagtttggcttacatattggaacctgttcagaaatttaattggcaattgttgaatgttcatggtcgttctgacttgtctcttaagtctgaagtagtaaaaaaaataatcagtatatctcttctgctaatagctattcaatttgatgcgatttatgtcgcactgtctttattgatatattcggtttgtgatgtaattatcattatatattttgtgagacaaataacagatatcagctacaaggaagaaattaggcaattaaagcctttttatattgggggactcctaatgtgtttgttgatatatttaacaatttgtcttatcagtaatgtatatatatcatttattgtcggtctattagtaggcttggtaacgtatgccattatttgtagactatttaattgtcctgaacttaaacacatatctaaaaaattatgattcatatagtatgtggaattgacgacaaatttgtaatgccatgtggagttcttatgtcttccgtttttgaaaataacaagaatgagcaaattgaatttcatgttattacggcaggactgaaaaacgaaagtaccaacagcttgcaaaagattgcagacaactataaccaaaggctttcgtttgtagttgttgatgaagttgtttttaaagattgtcccacaaacacgtatataagcgcagcggcatacaacaggattcttgcagcaaacattctacccccagatatgaaaagatgcctttatctggatgcagatatgattgtaaccagaaatgtaagagatttatataatgtcaatatggataatgcggcagtaggagttgtaatagaccaatccggtgatgacataagacactttaacagattgggttatagtagagaaaaaggttattttaactctggactgcttttaatggatttggaagtatggagagaaaaagaattacccaataaggtacttgaatatatcgattcgcataaaggcaatttgcaattccatgaccaggatgcattgaatgcggttctatatgacgatacctattatcttcctatgaaatataattcgcaattctcattcctatacaaaaatccatatattgacaaatcacgctggcaagatatgtacgaggcagcggaacacccggtaatcatacattacacaaataaaatcaaaccttggcatagagagtgtatacacccttataaagatatctggtttgaatactataagaaaactgaatggggaaagaataaattaagggtatattctaaaaagggatatatgaagattctcattaaagagtttctaaacaaatgcggaataagaaaacttaatccaccaactatgcttagagaagaattttataaattttatcaacattagaaatggacaatataaatacatctttgattgttaagtggttgagattaccaatggctttgttggtaatctttattcacatgacaccccatttaaatccacatttcacccctgtttatagcatagactggcaatctttatcaccagataacatatactcaattatcggaatctttttcaataatctatgcactgttgctgtccctttcttcttttttacggcaggatattactttttctttaacacagaaaaatttgataaagatacatataaatcaaaaataaaaaaacggataaaaacgctattagttccttatgtgttatggattattataacaatcattctgcgcatcttgtacggtctgtacaaaatgtacgtacttaaactatctatttcagaacttccatctgattgtttaacaatagatgaaataacaacactttcaaacattctaagttttttttggaactatttcataatcaacgaaaataacacttttaatccattagggctttcatcttatttagcagctcctatcaatatcccattatggtttttaagagacctgattattttaactgcaatttctccgttgctatataaaggtataaaatatttaaaaaaatggggtattgctatattattggctgcttttatcttaaatatagaaaccctaccaggtatacatgtcaaaggacttttcttttttgtgtttggaagctatctggctgttaataaacttgatattctggatactttcaaaagttacaagtggcttattccattatctatagcattactaataatgcttgtccctgccgacaacatgcctatatctacgagtatacggcatatatatcaagtaactggcatcattgctgttttccttttagccaatacaatgataaaaaaactcaagtatataaatcaatttatttttaaacactcgaatgcttccttttttatctacgttgtacatactattcccatagttgtcgcatctcctcggggctttgcaagtttattaattgataaaactctatatattagtggtttatataagcactcaggggggggggtaataagttacttcttaactccgtttgtatgtcttttcgtatgcataataatgtataatatattgaagcgttttatacctaaaacaatggaagcacttataggtggaagataaaatttcctctaataatatgacagatttaaatacaacaaatacattaagtaatccgctcaaccgctggataacatacggtatatggttaatgataaccctaatttatatacctattcctgcagttcctggtacgcttattacatttacgctatttatactttcattatactcaatgaataatgaaactagaggttttgctcttatgtgttttgctgcccctgtgttaggtgctttattctttgttttgcatattcctttaacggcttattttatatgtttattcttaggattggtatttctaaggaattatataaaatccagcctgaatat

SEQ ID NO: 639 - DNA, 4356 bp, Parabacteroides merdae
  source 1..4356: mol_type = genomic DNA
gaataggcataatagtacttatttatgtggaaattatccatttggaatgatatcagtgggaaattatacttatggaaagattgatataaattttttcacaaataaggaaaagctaattattggaaacttttgttctattgcagatggtgttaaatttgttacaggagggaatcattttgcggatagattattgacattcccagtaggaagtatttataatataggaaaggatgatggatatacaaaagggccaataatagtggaagatgatgtttggattgcaactaatgctttgattttatcaggagtgacaattggacgtggtgctatagttgctgcaggagcggttgttgtaaaagatgttccaccatatgcaattgttggtggaaatcctgcaaaaatattgaaatatagattccccttagaaataagagaatctttgatgaagatggatttctctttgttgacgaaagaatatatagaacagaacatagattttttttattcctatatttcagtagaatctaaatggtttacaaatttgtgtaaatgaaaatatgataaatgtactaattatatttggaactcgcccagaagcaataaagatggctccagtggtgaaaacactacagaaaaataataatatttttgatgtgaaagtctgtgtgacagctcagcatcgtgatctattagaccaggttttagagatatttcaaataaagcctgattatgatttgaatattatgaaatcgggacaagatttatatgatataacaagtcgggtattattggagttgaggtcggttttaatagaggctaaaccagatgtcgtattggttcatggtgatactactacttctatggccgcatcgcttgcagcattttatgctcaaataccggtttgccatgtggaggctggtttgcgcactcataatatttatagtccttggccagaagaaattaatcgacagataacggggcgtattgcttcatttcatcttgctcccacggagttgagtagaaagaatcttctgaaagaaaatattgatccgacaaaaattgaagtagtcggcaatacagttattgatgctttgcacatggcactttcattattaaaagaaaataagtctttgcaaatcaataatgaaaatcttcttttgcagagtcgaatacctgttgagctattatcaaaatggaaagaacatgaaagagtattagttttgataacagggcatagaagagaaaactttgggaaaccttttattcaaatttgtgaaagtataaaaactttgtcattaaagtactctaatgtggattttgtttatcctatgcatccgaatcctcatgttaaggaagctgtggagtctgtttttggagagatagaatcgatttcaatgaaatacacgaatttgttcttttgtaatccattggagtatttgccttttgtttcattaatggagctatcttatttgatattaacggatagcggagggatccaagaagaggcaccaggattaggaaaacctgttttggttatgcgtgatacgacagaacgtccagaaggagtagaggccggtactgtaaaattagtagggacaagtaaaatgaaaattgtagatgaagtttcttctttattggaaaatcatcaattatatatggcaatgagccaagcccaaaatccttatggagatggatatacatctgttcgtatctcagaaataattaaaagattgttctcaagtaaattatcatgaatgtaggaattgtaacgacttggtttgagcgaggggcggcttatgtttccagacaatacttggaggctcttcgatctgattcaaacaatagtgtgtatatatatgcgagaggtggagaatcatatgctcgtaatcagtcagaatgggatcgtgattttgttacttggggaaaagtaaataagaaatattattgtggagcaactggaatagaaaaaaaagattttatagattggcttaaaaatcgacaaatagatgttgttctatttaatgaacaaaattggtggattccagtaatttggtgtaaagaattaggtattaaagttggtacatatgtggattactatactgaagaaacagtacctttttttgctatatatgattacattttatgtaacacaaaacgtcattatcggttgtttaaagatttacctcagagtttttatatcccttggggtacagatattaatcttttctctaataatattgaagaatcatgtgaacaatcacagattacattctttcattcggcaggaatgaatccgataagaaagggtacggatactgttattgctgcttttttgtcattacctgctttttataaggataaggcaaaattacttattcatactcaagtcgcattagataattatgtagcaaggtatgatcaatcaatattattgagttcaaatatcgaagtgaggacggagactgttgctgcgccaggactgtatcatttgggagatatttatgtttatccttctatattggatggtttaggcttaactgttgcagaggctttgtcttgtggattaccctgtattgtaccagataatgctccaatgaatgaatttatacaaagtggaataaatggacgtatcgcggacgtagaatatttgtacgctcgtagtgatggatatttttggcctcaatgtaaagtttcagttaaatcgattcaagaacagatgatttattatttgaataatattgatagaataaaggtatttaagaaagaggctcgtatttatgcggaacaaaatttgaattggaaagatcgatatatgcaagtttgcgagatattgaagaatgcaactatagcaccatataaggaagatttagttgatcaaataaaatgttttgaacatagaaaaacaggtaagtttaatgtactaccttatgctttctattattggaaaaaactgaaaggataaaatgagattattatatattgcagtacatgagcaaaataaagattggggggctgaacattttttagcaaaggcgttcctctctttaggtgtggatttagtaactatcgattatagaaaacataggaaagatataattcaacgaataaaacaagtaggagattttgactattttttcttacaaagaggagatgattttcctataggaatattaaaatcaatcaatagacccaagttcttttgggcatctgaattagtttcaaggaatagagatcaagaccgattgttaaattcgggcttatttgaacatgtttttgttcacacattagcctgtaaacgttcaattatagagaaaggttggttgacagaagataaagtaactgttctattaaatggctttgatccaatgtcacattatccaatagagggaataaaaaaagatattgatgtcttatttattggaaatatgcttggtcgacgaagaaagtggctggatgaaataaaaagatcgtgtaatctatatgaggcagttggaatttatggtgctgatatggttcaattggtaaatcgggccaaaatagtattgaatattcattcagaggaatatttggatacagaaacaagattatttgaagtaatggcatgtagatcttttttgttatccgagagactgtctgaagattctccatttgtaaatggtttacacctggttgaggttatggatgtaaaggaaatgatttcttctattcagatatatctggaatcttctgaacttcgtcagaagatttcaaatggagggtatgaatgtgttatggaaaatcatacttatttgaaaagggctgagttgttgttatcactgtttacttcttattacaaaactggacagaatctgtctgttgatcctatccagttaaagaaagcggtgttagaaagtttttatttgtatgagaaaaatcgtttgcttgattcttataggcaattaaggtattcgataagaaaaagatttaaatgaaaaagaaggatattattttaagagtttggggtggagttggcaatcagttatttatttacgcttttgcaaaagtcttatctttgattactgattgcaaagttacattagatataagaacgggatttgctaatgatggatataaaagagtttatagattaggagacttttcaatttcattattgccagctttacgcttttatacattattatcctttgcacaaaggaagatgccttatataaggcatcttttagcatataaatttgatttttttgaagaaaatcaaaaataccctttagaaactttggatagtttttttaagatttactcggataagaatttgtatcttcaaggatattggcaatattttgattttagttcctatcg

SEQ ID NO: 640 - DNA, 2877 bp, Parabacteroides merdae
  source 1..2877: mol_type = genomic DNA
gggcggaagccctcccctttcggcttgtccgaaagcccacacttcggaacgaagtatagtgggctatacttccattaacgaaagcgcacaacaaaagtaggcaaaacgcttggaaattccaaatgctttgcctacctttgctgctgaccaaacggtagccgaccgatacgggagagctgctgacattaaaaagccgctggagtgaattgacggattcccgacatctccagcggcttgatgtatgtaagggtagaacggcagggtttgaacctgcaacccctcctctaaaaattgagtgctctgtccagttgagctacgtttacccttagttccttattttgctttttgggcttctttcttgtcttggtggttgaagtaaaccactccgacaatggctattactgaaacaagtccaaacattaccaatgctcccatgtttattctcctttctttttgtctttaacaagccaaagacctgctaaaagggttactactattgacaacgaacctcccacgtatattacccacttttcttgcacatccccgaaaattgaagaaagcacgactgccgtagttatatacttggcaatgtccattagccattttcctaattcttttttcatactgcaaatataataatttaattggaattattgtttatccccctcccgtcccccaaagggggagcgaccaaacggcagcactcactcaatggagtgttgctgttctttagtcctcaaaaggcagttgtggtaaatctccttgttctttcatcacatctattgtacctttcagctttgttgatgtcgtcttatattgtggataattttcattaatgtaagttgttgcgaatgttaccctatcaccgttaaatacgcacatgggatttatgtagtattcaatatccgctctacctcttgctattatttcggcactgcaaagctcgcctaaagctctaaaaatggatacttctgaataccctgtttcttccttgcattcgtccataaaaaacataaagctgtcttgattaggttttagttggccaaggatatatttaaagactttgattgatgcaggctttaaatcaaaaaaagccttgaatcctgctaaaaagaacttcgcaaaactttctgtatctacggctttatttcgtataaatacagaattaccaagaatttccccattaccgtcaactgcttttagaatggctgattcatctttatttgttcccttaactgatttagaaacaagtgcactccctatattaactaatgcttgttttgcaaagggattttctttgttaagctcgaaatctgatagtttacgctttgtcatactctactttcattttcatggtgatttttgatagtaacagtaacattgaatgttattattactttcacaaagatagtaaaaaatgaaagtaatagtttcttttaatgtgttatttatgaaactttcactttcttactatgaaagtcccactttcatagtatgaaagtcgcctatattgattatcaataacttatgctatgtttctttcttaagctcttaaatacccccaaaaatgccattttttagcttattttctttcatcttctgcactttcaaaaattacccaaaaaatgaaactaaaagagccccttcaaaagaggggctctccacgtccacgtttgggtaagttttgcgttttaatgcaaccttaaaatttcagttcttatgaaaaaaaccttctgttgttgaaatgctcatccccaaaatagaaaaacaaccccaaaaaagcaaagagaaacaagggtttaacattgagcaacactccattgagtgagtgctgccgtttggtcgctcccccttgggggacgggagggtgttaaagcgaatagcctttgttatgtctgatatacctttcgggatgcagctttttgtgctgttcctcgataacccctctaagctgtgcattctcttttcgcaagcggtctgccttttcttcggcttgcagcttcgagttctggaagtattttagaactttctggctttgtttctccgcttcgtgcttgtaatgctctctcatttgggtaaaatcctcgtaaatcgccttattttgcttctcagcccatttttcacgcccgattaatggcggtgtgccgatttggggtgctcttgtttcgtaattcagctccatactgttactcggataaatgagccgttcctctatcctgccgtaatactcccttacactgtcatgggtggcggtgctgcctttaatacccctctgaagcccgaatttgttctgcatgacttttccgtaacagtcctgcaactccgacagcttgcgtctgtcacccatgacctctttggcggaaagtctgccgtccacggttaacggcacaacgacacaatgaatgtgcggtgtccgctcgtccatatgtagggtgaagtccacaacgtttctccccccgaaccgttcgctgacgaacctgtagttctcgttcatccattgagtgagcctttcgggattctccccgatagctgtcatttcctcgtgacttcctgtaagaactacattcaggtgggtaacggcatccttgcggatggctgtctttcccttgtaaccctcctgtatgcgtctgttgattctttcctgtaatgaccttcggttcttgaaattgtcatagacatagactttcccattctcgcccaaatggtaaaatagatttttttccgaaagtttcggatctgcattgaggactttctttgtccggtctatatggctgcccaatccgccggctttaccggctgttcctttttcgatgtgaagtactgcgaatcccatttcttttccctattgtttttttggtttagtaatgcaatcaaaga

SEQ ID NO: 641 - DNA, 2507 bp, Parabacteroides merdae
  source 1..2507: mol_type = genomic DNA
ctttgattgaaaatggaactcctgtacaatatattttatctatatgacaacctctaaaagcatcactttctatataatccattgattctgggaatatgatttcttgtaagtttttacaattgtcaaatgaatgttttaatatagcgcatttgctttttatagttaatttattaattcctatacatccatagaaagagtatggccctatccatgttacagagtttggaatatctattttatttagtttttcacacccccaaaataccgaacctgaaaatgtcgttatttgttcaggtaaagtgatatcagaaagatttgtacacatgtaaaaagactcgtatccaagtgccaatgttttttgtggcagtatgatagattttagattagtgcaattcttaaaggcttcttccggtatgacattgtcttcatctccttctccgtgaatataagaatcgaacatatctacatattctaaagatccattttgcaccatattcctaagtacaataatatcttcattgttaatgttgccagttaatgtaatgtctgaaatattattgatttctgtattaatcttagagaaaagagtaccggctatttcaagatttatagttcgtttattctgtgcatttgcagaaataaaaataaatagaaaaaatagtgttttcttcattttgtttgtaattagtttgtttattgtttgatgatttttataggaccattgctgtactcctttgttacgcatcctaataccaggtctatatgtcttatggtttctttaggaatccggataggagaatgaatcaatcttccgtctgaatatgtactttcattgctactgtacgcgagaatgtagtcttctcctccatcttgaagtctttttgttatcctaaactctgtagtctcaatagaataattgcgtccccatattatcaatctattatcttctactcgttttaatgcaaggatactaccacttggatactcaatcatgctatctccataatgacggattgctgcggttgcttctgggaaccagtcgccggcgtctatcaattcggaaggagctatgtgacctgaattatctgcgaccattgtgttgacacctccaatgcttgcaacgtcatcataaaaagggattcgttttttttcacgaaaagaatctgaactactttttaaagtagattctctttcgttgtttatggtttctacattagaagtggagattttataataatatttatttacaatttcttctccaaaattctttcgtagaacatccatttgctcagtcgttaaatctctatcgcttttttcttgcatagaaatattgttttgcttgcaaccaaataaaacagcaatttcagattgtgtcttattaacttcttttcttaagccttttaaattatacataacatcaatgatatatcatttttattatctttgtgtcggaatcaagttgcggatgataccgactaaattgttaaactgttcccgtaagggactatataggcgacttcctcaaaccgcaactttggggttgtcgtctttgctttatcactatggatgacaataataaacttccgtatcaacaggctaccaaagagtctattctgaatttagcaattgaacgctataaatcagatgtacaaattcaatgtgatatttggaatagacgcaatgttaacgcttcttttccatgtcatttgaaccatctacttcaatattcgggattaaaactgttatctcccgaagagtataagaaagtccaagatgagataattgaaagcttacataaattactttgattgcttaggcataatacctaatcgtgcaattctcgaaactaattcttcatatcctataattttatctgtatcttttacttttgtgagcaacataagtattctatttttcccactctctaaaaccttgatatcttctggaacaacaatcatctccaaaagcaccttaactattgtattacaagtctcaatttctccgatattcgaaaagtggtataatgagcttattctgtaatctaaaaatcgatactcaactcctaaaggatcagacttaagtaaaatgtaataataaaaatcagaaatagcattggttgttaaagcgttatttctttccgtgcttatgagtgccgcggtcttagcttcttctaattccttgcttttcttatttatatctataaatgtatatatctgccatcctattagaattgtcactaacaatgataatactcctactatcactccttggtaatcaaatcccaattctgctttatgcggacaagctacacatattgcaactaaactaataagtacagctacagaacttaataataacgcccaactctctttcttcataaccactctatataatgtacgcaagaatacggaaaggttaaataatgtttatggacggaatgattgaatttcatggaatcatatttgggttttaactgataatatgttttctacaataaagagttttct
